United States Patent Application Publication US 2026/0191916 A1 - sequence listing, part 76

SEQ ID NO: 543 - DNA, 1580166 bp, Scatavimonas FBI02887
  source 1..1580166: mol_type = genomic DNA
aaatcctgtcatcccgaccagtgggagagttcttacagaactctcccatttttcttttttacaggttttgcggctcgctcaaacgaagggcaagctccggcagaaaatatcgcagcttgtccgtttttgttttgggaggattatttaaatgcgccgtcctgtagggaaggggcgagacgcagcgtgcttaagctgtccggcggccagcagcgggtggccgtcgcccgcgcgctcgcttcagacgccccattctgctggcagatgagccgacggggaatgcggatggctgaaattaaagtggtcttaaaagaacgcgcgcaggaactggaaaggcgtgtaatagttgttgcgcattcgaccgagcggcaaagcaagccggcgcgtgttcaggataaagcgcgtcaggctggaagccgccagccccaaaagatagcaaagcaagtttcgttattgttatagcttccctatgcaaaaggctcccgtttatacgggagccttttgcatagggaagtagtccgctgttctcaaaactgctattggataaacggcaagtatgctccataaccctccgcttccatccgttctattggaacaaaccgtaaagctgcgctgttaatgcaataacgtaatccgcccttatcctgggggccgtcattaaaaacgtgcccgagatgcgaaccgctgtctttgccgcgtacttcagtgcggcacattccatggcttgtatcggtttgttcctgtataagattgcggtcgataggcttcgaaaagctgggccatccgcagcctgattcaaacttgtctgttgaaacaaataggggcttgccggaaacaatatctacatagattccttcacggaattcattatagtattcgttttgaaaaggcggctctgtcccattttcctgcgtaaccttatactgcaaaggggtgagccgcttttttaagcccccggagcctgccgttaccggccttttcgcctgttcaaacctttttgaggggatatggcagtatccgcttggattcttatctaaaaacttctgatggtaatcctccgcgggcgcgtaattatcaagcgggactgcctcaatcgcgacaggacttttaaactgtgcctgtaagtttttaagagctgccagtattaccatcttctcctccggctgtgtgtagtaaattccggttcggtattgtacgcccacgtcgtttccctgcttattgaccgatgtagggtcaattgcttcaaaaaatctttggagcagctcagtcagcggcagcttatcggcgtcatatatcaccttgactgtttcagcatgaccggtcctgtcacggcagacttgttcataggaagggttctctgtctttccgtttgcgtaacccgtctcagtatcaataacacccggaatcagcgacaggtatttttccacgccccagaaacagccgccggcaagataaattgttttcttcatagcaatcaccatcctaaccgtagtataaacccatttttaaaatattaatatcagaatccgaaaaacaatggagcaaggtaacttgctgcgtgccaaatgtatgaacatgacattttccaaataggaaaaaatttagtataaataaaaagaaattaaacagaaaatatgagctgattaagtaataatttattatatttttgttaaatgtatttgattttatcataaaaagatatataatatataaaataagataaaaagacggaataaaggaggggcaaaatgtttgcggcgcataaagataacggcggctggctccaagcgttgcaagaccatctggaggcaactgctgcactcgcaaaggagtttgccgatgattttgggtcgggggattatgcgtaccaggctggtatggcacacgacataggtaaatattcggcagcttttcagaagcgtattttacataacgggcctaaggtagaccattcgacggcaggcgcaaaggagctggcggcacttcaaatgcatccggccgcaatgtgcgtggcagggcaccattccgggctgcccgattttggaggagcaggggatttttccgatgctccgaccttttctggcaggctcaaaaagcaggtggaggattatcatagatatatagatgaaatcaagcttacctacgtaagcagcccgacgttttcctctaattttgatatggcgttttatattcgaatgctctattccgccttggtggatgcggattggattgatacagagcgttttatgtccggtgggcttaccgggcgcggcggttttgaaagaattccttcgctttatgaaaggctttgtgtttttcttgaagagcaaagctggtggacaccaaaaaatgaactgaacgaaaaacggtgtgaggttctgcgccggtgcttccaaatgggaaaagagaaaaaaggcctgtacagcctgacggttcccaccggtggaggaaagacgatggcctccctggcgtttgcccttgagcatgcgcgggcgcatgggatgaaacgtgttatttatgttgttccctatacgagtattattgaacagacggcgcagaaattccgtgaggtactgggaaaagaaaacgtactggagtatcatgccaacgtcgattttaaagaggccgacggagacgatgctttagcccagcggcactatcttgcagcggaaaattgggatatgcctgtaatcgtgacaactaatgtgcaattttttgaatcgctgtttgcaaacaaagctgcgcggtgcagaaagcttcacaatatagcaaacagcgtcgtgatttttgacgaggcgcagatgctgcccctcccttatttaaagccatgtatccgggcgattgaaaatttggtgcgcggttacggcgtgtccgccgtgctttgtacggcaacgcagccatcgcttggaaagctgttttcagagggcatggagattcgggaaatctgcgaaaatattccagagcttttcacattttttaaaagaacacggcttgtattgcttggaaagcgggaaaccgcgtcggtcgcgggacagatggcagggcataagcaggcgctcgctgtggcttcaacgagaaaacaggcggccgcactttacgatgcgctgcctttggagggcaggttccacctttctaccctgatgtaccccgcgcaccgaaaaagaaagctcgatgaaatcaaatactgcctattaaagaatctaccctgccgcgtagccgcaaccccgcttgtagaagcgggcgttgacatcgattttccggtggtattccgcgcggaggcggggcttgattccattatccaggcagcgggacgctgcaacagggaaggaaaacggcctttagaagaaagcaaggtatacatttatgagccggaggacgctccgccgctgcttattaagcggaacatctctattcttcatgaaataatgccgctgtatgaggacttggattccccgcaggctgttgccgcgtactttaatgcgctttataaattgaaggatgaagagcttgacaatcaggaaatcatcagggcgtttgaaaagggaatcaaaggctgcaggctcccgtttaaccaagcggcgcagaggttccgcatgattgatacggataccagggcgctgttcatcccaatcgaagaagaggcaaaaacgctggcttacgaattgcagctggggtatttctcgaaaggcacgctgagaatcgccggtaaatatatggtcaatatttatccgaagcattttgaggcgttatgcggtgcgggagatgttgatttaatcgatgaaggccttggtattttgaaaaacctgagcctttatgattcgcataaagggctttcactggaagcggattttggtaaggcattgctcgtatagcaggagcgtttccctctgttcccaataaaaagaaaggggtaatatcatggctgtaaaggttgaggtttggggagactacgcctgcttttccaggccggagttcaaggtggagcgtgtttcttacgatatcatgacgccgtccgcggcgcgcggtatactcgaggcgatttactggcatccggggcttcgctggcatatagaccggattcacgttttaaacccaatccggtttaccaatattcgccgcaatgaggtcaagtcgaaggtttcggctcaaaaagcaaagattgccatgcaaaagggcggcgggcagctttacctgagcgcgccggatgatatccagcagcgtgcggcaatggtgctgcgcgacgtccgctatgtgattgaagcccactttaccatgacggacaaagcaaacgaaactgacagcgaagggaaatttcaggacattatgaagaggcggctgcgaagaggccaatgctaccaccagccttacttcggctgcagggaatttcccgctaacttccggctttttgaaggggaggagattaactccgcttatgaagggctggagcaggattttggttatatgctttttgatatggactactgcagccctgtggacatagagccgatgttttttcgggcaaagcttaagggcggcgtgctcgacctgcgtaattgcgaggtggtacgatgattttacaggcgttatcagactactatggcaagctttccgaaaaaggtgagatttctcccgaaggctgggcgcctgcgaaaatttcttatgcgctcgtcatcgatgaggagggcgggctggtcgatgtcatgccgacggtaaaggaggaacggcgcggaaaaaagacggtactgtttcccagcagctttgagctgccccaggcagttacccgctcgagcggaatcaaggcgaattttttatgggacagctccacttatctccttggtatagataccaaaggaaacagcctgcggacgcgcgactgctttgaaggctgcaaaaagcttcacttgtcgctgcttgggcatacggacagtggggcggcgaaagcggtatgtaacttttttcttgactggctgccggaaaaagcgggaaaacaccccgcgcttcaggattatctggaagggatattaaagggcgcaaacctaatcttccgttttgcgggaggttttgtccatgaggatgatgcggtcgctcaggcctggaacaattacaggaaaaagcaggcggaagacggtgcttcgggccggtgcctggtgaccgggaaccgcgggccgattgcgcagttgcacccgccgattaaaaatgtaaggggcgcgcagccgagcggcgcaatgcttgtgtcgttcaattctgattctgccgagtcctatggaaaagaacagggatacaactcgcctgtcgggcagtccgtggtatttgcctataccgcggcgctcaaccgcctgctttcggataaggagcacgtccagtatgccggtgatacgaccgtagtttactgggcggaaacagctcaagccgaatgccaggatattttcggctgccttatggacaaccattttgagagattcagcgagcaggagttttcccgctgtgtttcagagctgctcaagggcgttccgtataatttgaacggtgtggagatatcgccggatacgcgtttttatgtgctcgggcttactccaaacgcggcgcggctttctgtacggttcttttaccggaacacgtttggcaaactgttggaaaacattgaaaagcattatgaacggctcaagctcgtgaaacctgcatatgagccgtttgaacggctgtccatcggcaatctgctgtatgcggcggttaacccaaatgcgcgcggcaaatccgcgtccccgcttctttcgggggcgctttaccgcgcagtcctaaacaattcggattatccgcaggcttttttgaatgccgtacttttgcgtatccggtcggaacgaaaaattacatggggcagggcctccgccatcaaggcatgcctgctcaaaaagcttgaaaaaacaccaaatcaggacgtgaaggaggcgcttaccgtgcagctcaatgaattctgcacctaccagccctacatactcggccggctgttttccgtatatgaagcgctgcaggacgcggcgaatccagaaatcaaaacaaccatcaaggataaatacttcaattccgccgcggcagcgcccgcgtccatcttcgcggttttgacgcgtatgtcgggatattatctgcgcaagctcgagggaagccagaaagcttattacaaccaatcgatagcggagctgacgggtttaattacagagtcacttcccgcgcgtcacagccttagtgaacaggaagttttttatattggctattaccatcaaacacaaatgcgctaccaaaagaaaaggcaggaagaaatcgataaggagaaagcagataatgagtgaagcaattaaaaacagatatgagttcataattttattcgatgtggaaaacggaaatcccaacggcgacccggacgctggaaatatgccgcgtatcgatccggaaaccggctgcggaatcgtgacggacgtatgcctgaagagaaaaatccgcaattatgttgagctggtgggtgaaaataaaaaagatgcggcagacggtaaggattaccgtatctatattaaggagggcgttgcgctcaaccgcagcgacaatgaagcgtatatccatgaaaacgtcgatgaaaagacaatcaaaacagcaaaaaagaacgatgaatcccttgacgagaaaatccgggactttatgtgccggaatttttacgatatacgaacctttggagcggttatgacaacctttgtcaaggcggcgctcaactgcgggcaggttcgcggtccggtacagctgggctttgcgcgcagtgtggaacccatcatgccgcaggaaattacaattacgcgtgcagccattacaacggagctggacgcggaaaaaaagggcacggaaatgggccgcaaatttatagttccctatggcctttaccgtgcggaggggtacgtttcggcaatgcttgcgcaaaaggtcaccggcttttctgaaaaagacctcagcctgctgtgggaagcaattatcagcatgtttgaccacgaccgctctgccgcccgcggaaaaatggcggttcgggagctgattgtgtttaagcacgattccgaaataggaaacgccccctcctataagcttttcgacagcgtaacggtcaagcgggcgccgggcagggaggaaggtcctgcgcgtgcctacagcgattatacggttgatatccgtgaagatgagattccccagggcgtcacctgtaccagaatggtatgagcacatacgcgcaggaggttttcctgatggtttccggactgcggcatccttgattttgacagtctgcgctctgcacaaaaaggccgcggagggtaagcggctcctcatcatttctcgttaagacgtgtcgtgcgcacgctcatgcagaatttcccgcgcgcagactacccgcctattgctgctcaatatgtatcaaagcccgcagtgcaggggtcaccgctccccgtgagcggtgtggtttgaaataggtgctgctttaccgccgtcgccgtgtacaggacggcaaataagagtaaaaccattgacaaccagagggaataagctataatcaaagccgtatggtatcaaccttaaggggtgaaaaaatggcagggcagaagattgcttttccccatacaaatgggtaaataataaatttgtatgggagaaatttaaatgaaagaaaataaatacgacaacgacgttttttttgaaaaatacagccggatggaccgttccaaggtggggctgtccggcgcgggggaatggtcggagcttcaaaagctgcttccggattttaatgggaaacgcgtattggatttgggctgcggttacggctggcactgtatttatgcggcgcagcatggagccgcgtatgtactggggaccgatatttccgaaaaaatgctctcagtagctatcgggaaaacaaaccaggaaaatatggaataccggcgcagtgcaatggaggatttatcgtttcccgataaaagcttcgacgtggttatcagctccctggctttccattatattgaagattacagcgcgctgacggaaaaaatataccgttggcttacgcctggcggcagctttgtattctctgtagagcacccggtatttacagcttatgggacacaggaatggtactacggggagaatggcgaaattctgcatttcccggtcgataattattactatgaaggcaagcgccaggcagtgtttttgggagaaacggtgacgaagtaccacaggacgctcaccacatatataaatacgctgctaacccgcgggttccggctcaagcatatcgtagaaccaatgccgccagaggaaatactggagctgcccggtatgcgcgacgaaatgcggcgtccgatgatgcttttggccgcctgcataaaataataagctgacctttgtgaacgggcgggctgtagcggtatacagcccgcttcctttttaccgcttattttttggctgctatgcagcggcgtgatttttaatctcattgacatcgcttttctcacttgctatcataaggacaaacaatgcggggcgctgcggcagtgcgcgccggaaagaaggggttttgtggggcttaaaaacgaagcggccttataccgcgcttggaaaaacggggtcgtacatacaacgctgaacccaaaagggccgggcgcggtgcggattcatctggttcctcccaggtggacgcctttacgccatgcaccgtttgttgtgatattaaacggttattacattcttcccctgggctattcgtgggcagtgcttttacgtaattttattcatgaagtcaatcattacgcgggaaagcccgtcgacgacggggttatgcgccggattgcggaaaaggcagtcgagcggacgcaccggatttattacgatgtaacgcgtaaacagctaatggaggatatggaggaaataattgggacgctgttcgatattgcgcatggccgaacgccgcgcagtgagatacagccgctttcccttcgggagtatgcgccgcatatgactgcgccgcaccggatggatttgatgctcagcgctatgaccaaaaatggaacatggaactgcaattgtaaatgcaggcattgctacgcggcgggacagccgggcgcggcgtcaaaagagctttccaccgcacagtggaaggatataatcgaccggtgcagaaaagcgggaatcgtacagctcacctttacaggcggcgaaccgaccctgcgcaaagatttaacagagcttgttgattatgcgcgttggtttgtcacgcggcttaatacaaatggcgtgctcctgacgccggagctttgcgcaaagctttatgaagcaagcctcgacagcgtacaggttacgctttattcttcagatacggcgatacacgacccgcttgtcggagcaggacaggcgggggtggccggctgttgggaaaagacggtttcagggcttcggtgcgcgcttgaggccgggcttgatgttagcgtcaatacgccgctttgccgttctaaccaggactatatatcgactttgaaattcctgcatggacagggggtacggtatgtatcgtgctccgggcttatagaaacaggaggtgcgtccggcggcaaagctctcggttcccagctcagccttgacgagatggatggaattctcagggaagccgcgctgttctgcaagcacaacgggatggagataagctttacatcacccgggcgggctcatgctgaaacgctgcgggagctctcgcttaccgtaccggtatgcggcgcgtgcctgtccaatatggcggtagcccccgacggtacggccgttccctgccaaagctggcttggggaagggatggggcttggcaatatgctttcggataactggcgcggcatctggaaccatcctgtctgcaaaaaaatccgttctatgccggaggatgaggccctgcactgtcctttgcgcagcaaagacaggagggaagggggctgtgcgcaatgacggaattagaaaaatctgcggaaaaaacaagcaagctgaagcgctgggggcctgtccttgcggttttgctgattggcgccgttatactgcttgtttatatcgtttcagcgaaccagccgcttgacaaaattcaagactaccaggtcgaggttaccccgttggaggacggtacgctcgatattacgtaccgactgcgctgggaggtgctcaacagtagcagggaagggccgctgagttgggtgaaaatcggcatggcaaatgagaatttccgtataaaagaatacggcggggctatactatccccgcgcaattccgtggacagctatgcgtcgttttccctgagaaaagaatttgaaaagggagagacggcggagttctggtttaccgttaaccaaaggcgtatgcttctgcgtgattcgtcggacaacgggaatgattattacgaattcacaccgggctggtttccaaagattgaggtggagcattacctgttttcgtggaaaggcgtgccgtccatcgcggacagcaacgcggacagaacagaagacggcaggcttatttgggaaggagcgcttaagcagaatgaacgcgtcgatatttgtgtaacatacaaaaagggggcgtttgactccagtacggcgctttatgcttcaggcgttacggcttatcaggaaaatacggacgagggcggcgggccggacctgcggattattcttgttatcgtgttcctgacgatttccgcggccattcttgtaagtgatgtttccggcggcagcggttaccgcggcgggcgcggctatcacatgtatattggcgggcgaagaggcggcggaggcggctgtgcctgtgcctgcgcggggtgcgcgtgcgcctgcgcttgtgcgggaggcggccgggctggctgcagcaacaaggacttttaccagccggataaaaaagaagaaaaaccaatcgagccataaattaaagcttttaaacaaaaatttgccgtccgttggctgtatgcccgcggacggcgtattttttacctaaggcgcacaatgttgtatttctgcctttttgtggtatgataacacttgaagtatactttagcgctaaaacggagatgaaaccgatgacctttgagcaaatgtacaaagacctgctgcggcgtaccacgaattccgaggaagtgccggagcagctatatgacccttatcatctggactgcctgctgcatcctgaaaaatatgcccctgtcctgcgaacggaaccatgcggggattcctgcgagttcggccgcgcctgccagaaaagctgtatgttcgatgccatttcacagaatgaggacggcagccttacaatcgacccggaacagtgcgtcggctgcggagcctgtattgacgcgtgcagccttaaaaagctccaggcgagccgcgatatcctcccggcgatgaaagccgtcagggacacggacggccctgcctacgcgcttgtcgcaccggcctttctcgggcagttcagcgaggacgtcacgcccggaaaactgcgcagcgccttcaaggcgcttggttttgacggcatgattgaggttgcgctgtttgccgatatcctgacgttgaaggaagcgctcgaattcgaccgcaatattatccatcaagacgattaccagctcacgagctgctgctgcccaatctggattgccatgattcgcaaggtctaccatgagctgatgccgcatgtcccgggtgccgtatcgccgatgatagcctgtgggcgcgttatcaaaaagctgcatcccgacgcccttacggtgtttgtagggccgtgtatcgccaaaaaaagcgaggcgcgcgagccggatattgccgacgctgtagattatgtactgacgtttcaggaaatccgcgacgtatttgaggcggcggatatcgaccttgcggcgcttcctgaaagcgagcgtgaccattcttcccgcgcggggcgtatctatgcgtataccggcggcgtgagcgaggcggtgcgccgtacagtggagcaattgagcccggaccgtgaaattggagtgcgtacagagcaggcggacggcgtacctgcctgccgcaaaatgatagagaagctgaaggcgggagagacggacgcaaactttttcgagggcatgggctgcgtgggcggctgtgtcggcgggccgcgcgctattatcgacagggaagaggggcaaaagcatgttgccgcttacggggatgaggccgcatatgcaacgccgcttgaaaatccgtatgttatggagcttttgcaccggctgggctttgatactgtctcagagctgctgcgctacagcgatatttttacccgcaaattttgattaaccggaaagggcctctccggcagtttcataaacagcgcttccgcataggataacatgggggtgtaagccgatggatttaaaaaacggtaaaattacagtacgtgaaattttgggctgcccgcaggcaaaggcgctgcttgagcgcgagctgccgcaggttatgtgttccccgctcgtcgcaatggcgtcgtccatgcagctgaatcaggttttatcctttgcgggtggaaaaattcctccgcaaaaaatcgaagagctgcttgcgcaattaaaaaagatttaattaaaactgcgcctgaacaggaataaaaaactgtcttgaaacagccggaacaggtgtccggctgtttcttttatctggaaaaagttatagcatagggcttgacaagtttaactgtaatatttataattacagatagaagtggaaaattcaacaaaacaattctcaataggaaaggcggactctttgtgaaaataaaaaccgttagaaaaacggcaggggccctggctctctgcggcgtgctgcttctggcgtcctgcgcggatgaaaacacggggcaaatgaaaacctcgccgccaaaggcggaaaagggcttgtcacagaaatcaggagaaaaaattgattataacggcttgcttaacgcgctgccgcaaagccaaagcccggattttactgattttcagacgattagcctcgacggtgaaaaaatcgatgaaagcatttggagcggaaaaaagcttacgatggtgaatatctgggcgaccttctgcggcccctgcatcaacgagatgccggagctcggcgcgctatccaaggagtacggggggcaaggcgttcagatagtcggaattgttatcgatgtgcttacttcacaggggatttccgacagccaggtcgatttggcaaaggatatcgttgcgcagacaagcgcggactatacgcatctgctgccatcgggcgatttaattgccgcaaagctgaaggacgttagctctgtaccggagaccatcttcttagatgaaaacggaaaacaggtaggaacctcgtttctcggtgcgagaagcgcagaggaatggcgcgcggtcatcgacgggctgctcaaagaggtttcatgatgaaggcttttttgaaaaacaatcgcgcggcggccattttagttttgcttggcgtgctgtttatcttactcggtgtaatccggctggaaaatgaaacggtgttgatgaaggcggtcagcatttgtctggagtgtattggtattggataagaagagaaagcctgtaaagcacctgcgcctttgggtgcaggtaatcgttgccgccgttacaaacggttatcttatcggctttgtaaaggggaaaatatttaccggatggaccaaacagctttgcgttcccgggcttaactgctattcctgccccggcgctttgggctcgtgtcccatcggctccctacaggcggtgctgggaagccggaactataaattcgcgttttatgttacgggcttcctgatggtcgtcggcgcggtatttggcaggtttgtatgcggctggctttgcccgttcgggctggttcaggatttgctttataaaatcccgtttttcaaaaaactgcgcaagcttcctggagacaggtggctgaaatacttaaaatacgttattttgataggatttgttatccttctgccgttatttgccgtcgatattgtagggcagggttctccgtggttttgtaaatacatatgccccgccggcacgcttgaaggcggcattccgcttgttttttctaattccgctttacaggcagcggtcgggtggctctttgcgtggaaaaaccttctgttgatagcgctgatattgctctccatacctgtttaccgccccttttgccggtatttatgcccgctgggcgcgatttacggacttttcaaccccattgccttttaccggtataaaatcgacaggaattcgtgtaccggatgcagggcttgccaaaaggtgtgcaagctcgatatccccgtttatgaaaaaccaaacagcccggattgtattcgctgcggcgcctgcaaaaaggcttgcccgcatcacgcaatttgctcaacgcttaaaaagcagaaaaaggaggaagaggtatgagcggccctatttatcaggttataacgactgcaatacatttcggcgggcttggagcggctgcggcattaatgattgtttctatccttcttttaacgcggcggcttcgtccggcctggggcgtattctgtatcctgtgctcaggtgccgccggtttcctcctcgtcagaagtttggtttcccaacggtgcggaatcacctgtacgctgccaacagaaatagatttggttttttatgcggggcttgccgtttttatggttgccttgctggcggtatgccttttgtttctgcggaaaatggaacggggctgacgcttattagggcgcaggctcgggacttaaactcataaatgaaaatacattaaaaatgaatcgaaggagaaagaatgatgaaacgtaatggcctgttggttttgctttgctgcctgcttgtattccttgccgcctgctcccccgaggccgaaacaccacccgcttcgagcgcttaccagaaagaaaccgcggcgacctccggcaagccggaggcttataataaaataactgctgagtatgcaaaagcgatgatggataagggcggagtggtagtggtcgatgtcaggacggaggatgaatatcgtgaggcacatattaaagacgccgtgcttgtaccgaacgaatccctggataacggcaaacggccggaaaagctgccggaccctgaggcaatcctgctggtttactgccgtacgggcgtcaggagcaaagaggcgtcgcaaaagctcgaggagcttgggtacaagcatatatatgatttcgggggaatcgcggactggccgtatgatacggtatccggggaggaatgacgcatgaccagtgaatttggaatcgcggtccatgcgcttgtgtatctcaaccacaaagcgagaacgctctcaagcgaggagctggcggagaatatttgtaccaacccggcgcgtgtgcgcaaaattatggcactgctgaaaagggcgggcttgattgaaacaaaagaaggcgcggagggcggctatcttttctgccggaaggcggaggaagtaaccctcagcgaggtaggaaaggcgctcggcacggctttcgtttctgtttcctggaaaagcgggaacgaggatatggactgctatatcgcgtccggcatggcgggaattatggacgggatttacgcgcagctcaacaagctttgcggtaaacatttggagagcatctccataggggacattgacgataaaatattttccggccggacgcgcggccagctgaagaaaaagtagaagggcgggttatttatgaaaaaatacgacgcggttatcattgggttcggcaagggcgggaaaacgctggcgggggcgctcgcggccgccggcaaaacagtagccataatagagcgttccgcgcagatgtacggcggtacctgcatcaatgtgggctgtatcccgaccaaatcgtttgtcaacagcgcgcaggaagcaaagaatttacccggcggctttgatgaaaaagcggcgcgctacaaaagggcggtggaggaaaaggagcggctgacaggcgcgctacgcaaaaaaaatttcgacaagctaaacagcctgccgaatgtagatgtgataacaggaaccgcctcgtttgacagcccgaaccagctttctgtccaaacggattttgagacgttcagcatagagtccgaacaaatttttatcaataccggttcccgcccgtttatacccccgattccggggattcaaaacaatccgtttgtatttgtaagcgaaaccctgcttaatctaaacgaattgccgcggcggcttgttatcatcggcggcggctatatttgtatggagtttgcctctatttacgcaaatttcggagcacaggtgaccgttatccaggacggcgcggtattcctgccgcgcgaagatgaagaaattgccgaagcggttttaaaaagcttaaacgaacgcggtgtgcgcgtactgcggtcagccgaagtttataaggttacgcaggaaaacgggcatgcgtcagtttatgttgaatctccgcggggaagagagaaaattgaagcgcaggcggtactcgtagcagctggccgccggccaaacatagatgccctgcatctggaaaacgcgggtgtggagataacgccgcgcggcgctgttaaaacggatgagcgtctgcgaacgaacgtcccgcatatttgggcaatgggagatgtaactggggggcttcagtttacgtatgtctcccttgatgattttcgcgttgtaaaatcacagctgctgggcggcgggcagcgcacaacaaagaaccgcggcgccgttccctacagcgtatttttagacccgccgttttcccgcgtgggcctgactgaaaaagaagcgcgcgaaaagggttacgatgtactgacggcaaagcttgccgccgctgctgtcccgaaggcacaggtgcttttgcagccgcaggggcttctcaaggcggttatcgataaaaaaacaggcttgattctcggcgcgcatcttttctgtgtggaatcgcatgaaatgattaacctgctcaagcttgcaatcgattcaagcataccttatacagtgctccgtgacaatatttatacgcatccgacgatgagcgaggctttaaatgatttgttttcctccattcaggaagacgcgcatgaaacagaataataaaaaatgggactctgccaaaacagagccccattatttatagcggtattatcgtcaggactgggtgcggagatggccgtcgccggcttcggtgcggtcgcggaacaaaagcgaaatacaccagattgcagcaagacctacaagcgtgtagataattctgcttacgataccggtctgtccgccgcaaatccatgcaacgagatcaaactggaagatgccgatagcgccccagttgatgccgccgataattgccaggataagacaaattttgtcgagcatgtttcttcctccttttccttttgggattatcattcccatagaaaaaagaattatgcggctaaaacagtcaggcccaaaacaatggctgcaacgccgagtacaattgcggcgcttccaataattttgacgatttttatcgtcttttgaattttaaatttttgcagcatatcgggcgtgccaaaggggaaaaagaagtacaatagccccaggaaaaccagggcggttcccgcaatgtacgcgccaacctgcgcctggaacagcgtccagaacagcccgacggtaagcgcaaggaggccggtaaaattaataaatgaaaacagctttcttttattcctggtcaggctgtaatatttacccgcctgttcttcgcagcgtttaccgcagtattgctcgtaatatgaaatttctttggcacaatattcacagtgcttcatttgtatcattccttaaaattcggcgtttatcatttattatattctgtttacgggtaatgtcaaccttaaggaacgaacggcttatttaaaaagaataaaacagtggtatatattccggcggcctgcagtccccactgataaatcagcagaatcgtaaagactaatttcttaggctttatcctcctctgcctgcgcagctttttataaccggcaattgataccgcgttatttgctaaaaggaaaaaattcaaataaataatgggcgttgcgtaatgaaaaatcgtgctggaattagagttgtttaataagaacaccgccacgattagggcaaaggccagcgtactgaaaatcagcgcagtccaaatccattcacggaagctgcgcggaagaaacggcggcctgccttgattggatttcctgcgcggtttgtttttgcgggtcatgggctctgcctcccttatgtatacatcccgattatagcaaaaaagaggcggcattaaaagcggatgtgaagattgcccgccgcgttttttatagcgttatagttttattaaggggttcattgtgaaagtccaatggtattaagtcaagagggtggttaaagaaaaaagcagaaaaagcgttggaaaaaggcacagataacgcgaaaaaggcaacacacccccaagccctgtgcctgagtatttttgaaacagggccgtttcgtcagagcggcaagctgatcgtttagccctccggcggaatatacaggcggttgtccttcagcagtcgaaagaccaaccggaccagttttctggcagttaaagcgagtgcacgtttgtgctggtatttgttgacctctttaaacttaaggtcgtagtagcgccggaactcggagtcgcatcttctcacggaattggcggcttccagcaggtagtagcgaagatagcggtttccggatttaatcatccgggagtgctccgcctcaaagtcgccggactggtgctgcgtccagacaaggccggcaaacttggcaacggaagcctgagaatcaaagcggtggatatcgccgatctcagcgatgataccggcggagtagaccttgccgatacccggtacagaagtcagagtgtttggaatgatctcaaattgctgttcaatagccttttctaagaccttgacctgctctttcaatgcccgcatagaggcaatggaaacggacatggcttggtttacagtatcgttcacagtcttaggcagacggtaagagcctctggccgcagcttgtactgcttttgcggtggccgctgggtctgcaaatctaccacggccagtctcggcaacaaaggcaatcaatttctcatggtcggcgttcgccaagtcatccacagtttcaaaccgttccatgagcgcaatcgtagtggcgctggtgttttgaatgtccttgtcctgcgccatgccggagcacttgagaaacaggtagttagcaaacctctgcttctcgcgggtcaggttttgaatgacgtcaaatctggctctggtgagggtttgcagggctttgtagcggtaatcgtccatgtagacctctttggcaattctgccgaaacggagatggtcggcgattacgaaggcgtccacccagtcgttctttggcaggtctggataggactccttgaacttacgcacctgctttggattgaggacatggatctttcgctggaacctgacgagtccgccgtcctctcggagcgcgtaaacaagactgtccccgtagatggaggtagcctctaagccaatcaccacatcgctgagctgcatggaaccgagcgccgacacgattctctctgacaacagtttagcaccgccgagattgttctgcacggaaaagctgctgtgcttgccgccgtctggcttcatcaggtaggccacgttgtttttgctgctcacgtcaatgccaacgtaaagtgagttcatatgtttcacctccccgcgtggagatttcaggccagcaggctttgagatacccatgataaccggagcatccgcaacctcgcgtatcagaatcattccggagacggccaatgcgatatccctcactgttgaaagggcggccttgcctccggcaaacagccaatgagtttgcagctaacttccggatcaggggaacggactttcaatgaagcagccttccggctcaactaggagaatgagagcttgaccctgctgtcctacagctattgtatcacgggtatctctaagcctgctgatacctgaagtgaattaagcagacacacttaaaactgtctgcaaatcttattatacgaggagaatcgagatgatgtggcttttctttgcgattgcttccgctttttttgcgggcgttacggcaatacttgctaaaataggcgttaagaaaaccgattcgaccgtagcgacagcaatcaggaccgccgttatcctcctgttttcctggctccttgtttttcttacgggcgcgcaggcgtcgcttgcgcttgttgatggaaaaacgcttctgtttttaatcttatcgggtttatctacaggcgcgtcgtggctcttttattttaaggcgcttgtaaacggagacgtcaacaaggtggcgccaatcgataaatcaagcacaatcctgacaattttgctggcctttttgctgcttggggaaccggtttctcctggaaagggtgcggggattatcgtaatggcccttggcacctttctgatgcttgaacggcgcggcgcagtaaaaagcggggagaaaaagaattggctgctttatgccgtgctttccgcggtctttgcaagcctgaccgcaatcttgggaaaggtcggaattacgcatatcgattccaatctcggtacggcaatccgtacggcagtggttctggttatggcatgggcaatggtattcatcacccgaaagcagggtgaaatcaggcatattgaccggaaaagctggatttttatctgtctgtcaggggtgacgacagggctttcatggctttgttactacagggcgcttcagagcgggcaggcaagcattgtcgtaccaatcgataagctcagtatcgtagtgacggttgcgctttcctggctgttcctgaaggagcggctgacaaaaaaatccttcttgggccttatcctgataatagccggcacgttctgcctgctgatttgatatggctgtatgaagcgggcaggaacgcggaatactaacatcaaacaaattgcagggagagatttagatgcagattacattccagggtaatcccgtgacattaaaagggataccgcttaaaaccggcgaccagatgccggattttagcttgacggacaattccatgcggcaggtgcaaagcggcagccttgagggaattcgcgtattcgcggctgtcccgtcgctcgatacgggcgtatgcgatgcggaaattaaaaaatttaacgcgaaagcttcacagcttccggaagtccatatatatgccataagctgcgaccttccgtttgcccaggcccgctggtgcggtgctgaaggagtcgataaggtacagacgctttctgattacagggacaggagtttcgggcttgcaaccggtacgctggttgacgggcttatgctgctgacgcgtgccgtttttattgtagacgaaaacggaaaggtccaatatgcgcaatacgtgccggaaattacccagcatccggattatgaggccgcttaccgcgtgttggctgagcttacgggcaaataatcggcacgtgctttttattttaccataccgtcatgttccggtgtgattagggcatactaattacaaaggagtgttcgtatggaaaaagaaaagcaaaggaaaatttgtcccgcctgttattttgaaaacgacccgcaaacgcgttattgccagcgctgcggagggtattttgaaccccatatgacgctgcgggatatgttcagcgacccggaaactgttgtggcgaatattggcggtattaatgacagggaagtatcgattatgccgctcggaggatttacaattaaaggctttgagcgtaagatgcaggcgcaaaacggcgtctctttcgatgagactggcgcgcgcgtctctccgcttagggacggttcctggtattgcccggactgcggcgtgcacaatacggccgcgagcctgtcgtgcaaggaatgcggaaaatataaataaaagccgcgggtgtttattgcccgcggcttaatcttttaacttagctttgtaaaacgcgcaaccagctgcccgttttgctctaccggttcggtaaacatatcatatgggcgtacccataagccctgttcaccatacatcgctttataaacgacgagcttttctcctgtttcactgtgctgtgcgataccaatcacctcatactcgtttcccttgaaatggcggtagcgcccgcaggtcaccgggacaggcgtttcctcccgctggcaatcctgtgggacaggcccgccctgcacaagcttgcgcgtgaattccccgttatggagaaccagaacgcgcgctccgttttgcgggacaggaatatttgcccatccgttatccaccgtgaatacgtccccggtcagtgcgtccgtcagcttttgataagagccgtcaacgtgaaagccaatccactgttccgaatttgccacgttgagcgcgacataaacggtctgcccctcgcagcggcgcataaagacgagctgctcgtttttaatcacggtgttttcgaaatctccgtattgcagcgcgggcagggaacgcctggcactgccgagcgttttaagaaatgcgcacagcgtctcgtcagcgtccggaattgagccgaggtcaaggcagggacgcagctccctgtcgctttggttcgtccgcgtgccgtgaattccccactcgcttccatagtaaacggacgggacgcccggcatcgtgtaaagcacggtataaatatttttcaggtgtgcgcggtcgcggcaattgtcgccgattcggttgacgtcgtggttgtcgacgaaattataggtgcagatatttttgtaaatgccgccctgcgcaaattggcgctggagggagtgggcgatttcaaaatagttgtggtcgttgtgggaggagtaaattcccttgaagcattcgtagttggtaacggaatcgagcatttccgggttggcccatcggctgtaatcgccgtggatgatttcacccatcagccagaaatccggctttttgtttttacagaagccgcgcagcgtgcggaaaaagtccgggtcgatgcaatcggccacgtcgagccgcaggccgtcgatgccgaattcgtccatccacatcccgattgcgccgagcaggtggctcgtcacctccggattgcgcaggtttaatttgactaaatcgtagtggccgctccagccctcgtaccaaaacgggtcgcccatcgggcttgagccgccgaaattaaggttttggaaccagccgcagtagggggaggcttcccgcttttcctgcacatcgcggaatgcccagaattccctgccgacatggttgaacacgccgtccaggatgatgcggataccgttttcatgcagttccccgcaaagccgtttgaaggatgcgttgtccccaaggcgcgtatcgattttataataatccttagtgtcgtagccgtgcctgctcgaatcgaacagcgggccgatgtacagcgcgttcacgcccagctcctttaaatgaggaatccattcggaaagcttatcgagccggtattccacctggccgtcgttatattccggcgctccgcagaagccgagcggataaatatgataaaagacagattcgttaacccagttgcccataattaatatcacctttgttcataaattgccgctttgccgtgtgtttacaaaacggagacaccattataacataaagcgccgcggcgtacaagaaggggcgcggcttcctttgacacatggcacaccccatgctataatagttccaatatattatgggagggaatcacgcagatatgaatatatggcatgatatcgattcctcgcggattaatccgaaggattttatggtcgttatcgaaattcccaaaggcagcaagacgaaatatgagcttgataagcatacgggcctgctcgagcttgaccggatactttacacctccacgcattatccggcgaactatggctttatcccccgtacatacgcggatgatttcgacccgctcgacgtactggtgctctgcagccagaccgtttacccgatgacgctgatccgctgctatccaatcggcgtaatcagcatggtagacaacggcaggaacgacgaaaaaatcattgcgattcccttcaacgacccaacctataacgactatacggacatcagccagcttccaaagcatatttttgacgaaatgcgccacttcttctccgtctacaaaacgctcgaaaacaaggaaacggcggtcaacgaggttatgggctcgcaggaggcggttcagattgtgtcggtagccattgagagctataaagagaaattcaatgtaaaataagtgaaacgggaaggaactgcgttatgatagacaggccgaaggaaatagatgagagaacagatggaaaaaaggtcaggaacctgcgcatcgcgctgtgcgttttttttgtaatcattacggcgtgtatttcgctgccgttcgttttagcgcagagcgggaccgagtacaaggggcttacagttatcacctttttcagtaaggcgtttatgagcggcaacatcgctcaggggcttttgtacctgatgttcggtattattcccgccgcaggcttttttatcgcggtgtttgaccgcaagcgtatggtaaaagggatagcgggcgttctctgctcggctttgggcgccgcgtgggtgaccttcttcgtcggcccggtcaatcttttgcccggctcgctgttttctttacttttatacatacttacatttatcctgtctgtcatgctgttacttgccaaggcggcggaaaaccaagaaaagcttcaggcaaagcagaagaaaaagcaggaggaagagcatatcgtcattaaaatggacaaggacggttccgctgcggcggaaaagaaatcggaaaccaaataaatgcagcaataaaacgcccggacgaataaacgtccgggcgttttctatgtatccctttgttcctgctcgcgtttgagccttctggcgtcgagataatcctgcaaaataattgtcgccgcgacgctgtcgatgatttttctgcggttttttttatgctgtgtgtcggttgaattcaagaagctgtaggctgatatcgtcgtaccgcgctcgtcgcgcatatcgaccggtataccagacgcctctttcagcttttgcgcaaagtcccttgcatactgtgcgctttcaccttcgcttccgtccatattgcgcggcagcccgacgactatcagctgcgcgcggtgcccttttgcggcgtccgcgaccttctggagcagcagcttcgggctgcgctcctcaaccacgcagaggggggaggccagcatttcaagctcgtcgcacagcgaaagccctgtgcgcgcgtgccccaaatcgactcccatgataatcatgcctaacctctcccttcggaataattactggaagaggtccctgtcgggcttgtcttccagcttgatataagcgctcagcttgttattgtaatcgacagcggcgagaaagacgtcgtcgggccggtttacgcctagctccttaagctcctttaaaagccactgcttgtcgttgcccgtataatgcaggttgccgtccaggattttgccgtccgtaattacggggatggaaggcttttcattctctgttttcagggaaaaatccttcggggtagcgggacggttttccgccttgggcataaaggaaatctggccgtttggctcaaagtttgctatttgcagctcgttcaaatcaaaatatccgtttaacctgcactgcgcaagaaattctgtcaggtcgatttttgcttttgcaaagttctttttatagagcttgccgttgttgaataaaatcagggaacgtcctgtgaaaatcctgcgccagaacgtcgaacgccctgaaaggaatgaaaaaagcaggacgatggctgaataaataatcatcgcaagcagcggcttcatgaagtcgtcctcaagcgaggtcgccatttcagccgcaattgagccgatggtgatgccattgatataatcgaacatatttagctcggaaagcgcgcggttaccaataatcttggtcaggataaacaggacaataattgagccgattgatgaaagagcaacattcaagagttccatagctaacctctaatatcttaaattatagttgagattagcattgcctgttatcaaaaaatcatgcggttttattgctgtaatttaccatggatttatcgtaccgctcagctcggctacggatttcattccatgctcgtcgagataacggttcaggccttcacagattttgacgggcgcgtatgggtcctggaacaggatggtaccgatttgcaatgcggacgcgcccgcgatgagcatctcggcggcgtcctgccagcaggagataccgcccaacccgataacgggaattttgaccgcctgcgccgcctgccaaaccatacggaccgcaacgggaaagaccgccgggccggagagcccgcccgtattgttgcgcaggatggggcgccttgtttcaatatcgatacgcatgccggtaagcgtattaattaaagaaagcgcgtccgcgccctcgctttccgcagcctttgcgatttcagcgatatccgcgacattcggagaaagctttacaatcagcggttttttacagtgggagcgcacagcctttgtgatttccgcaaccgaagcgcaggaggtgccaaaggcaacgccgccgcttttgacattcgggcaggagatgttgagctccaccatattgacgggcgtaccgtttaatttttcagccattgcgcagtaatcctcctgcgtactgcccgctatgttagcaatcactgccgtgcactgctgtttgagccacggcaggtcgtgctcaataaaatggccgacgccgggattttgcagcccgacggaatttaaaatgccgctgggcgtttccgctatccgcggcgggggattgccgaggcgttcttttaacgtaatgcctttacaggacacgccgcccagcttttccagcccgtagaattcgttatattcccttccgaatccaaaggtgccggaagctgcaatcagagggttttgcagtgtgacgcccgcaattttaaccgataaatcagccatcagaaaaacacctccccagccttgaatacggggccgtccttacatacgtgggagtagccctcttttccgtccttttttgttttgcacgcgcagacgaggcacgcgcctacaccgcagcccatacgctcctcgagcgatacctggcagggaatatcgtgcttttttgccatatccgctacagctttcagcatcacgttcggaccgcaggcgcatatgccgtcaatcttgccgataacagacgcgagcgcgtctgttacaaagccgtggattcctgcgcttccgtcgtccgttgtaagcagcacttcgcagcccaccgcctcaaaatcgtcggtcaatatgacctgttccttgccgcgaaagcccaggatagcaaccgccctgtccgcctgttttgccgcgtagagcatggggggcgtgccgattccgccgccgataaacgcaatcttctttcctttttcaatcgtaaagccgcgtccgagcggcgctataatatcgagcgtttcgttgggcttcgtttcagatagtatttgcgtcccctcgccttttacctggaagacaaggcgcataatgccgttttgtacgtcgcagatggaaatcgggcgcctgagcattttcccttttaccaatacatgcgcgaactgtccaggggcagcgatatcagacagtacgttgttttttaaatgaaaatcaaatataccgggggcaatttcctcttttttaaccagctcaaaaagctgggcgtcatatttcatgccggtattcctctccttcatacacttttcagcatttttcttatattttatcacattatatcacagcggcacgcttctcacaacggacaaattgaatagcggctgataagtttttgcgttcgtttcgattgttttttacagaaaaccatgttatgatatcgtcataatatatacctgttttgtataaagagagtggaaaacagtggaacgtctgaaaaaggtttacaaggtaatgacgagcagggaaatgctcttgtatatgctgttcggcacgggtacggcggccatcgattttttggtggcaaagctctgctaccagacgctcccgctgcccaaatccgctttgcttacggcgcttgcaaacgcgattgcgtgggtgctttccgtcacctttgctttcgtgacgaataagctttttgttttccagagcaggcgggcggggcgaaaaacactgtggcttgaaatgttcggcttttacggcgcgcgctttttatcacttgtgctgtccatcgtgtttctgattatgcttatcgatatgcttggctggaacgcggatttggcaaagctgctcgtaacggcgtttgtgattatgtttaattatgttttcagcaagtgcgtcgtgttccgcgacagggaaaaactaaaatagaatgacgcaatccgtaaaaaggccccgcatccgtatgaatgcggggctgcgtgtttattactgggatttaagacgtataattgagccgtacctctacaatacgcagccgttcctttttaatgatagaaacgttgttttcgtcaatttttgtactgccaagcaggctgttgacgtcttcaaggtactggaagaactggtaaggctccttatagaacaggccgtccaccgcctcctggtaatcgattgagttgctcacctggatataaaactcgtttttgtggccggataccgtttccagcagcgccgtctctacaatattggtcgatttttcgtcgaagccgtaaaggtatacggcggcatggcggtaaaagctgtcgtttgtttcgatgcatcgcggaatgccgatgttgaacatctgcgccggagcgcttgatgtaccgcagatttcatcgtaggaaagctccgtgaaatcctctgccttttcatggtcgtattttaaagtgaaatcggtaatattaaagtagtcgtagaaaatatagctgtcactgtcgtcccaggtcgcgtccagatggtaccagcacccattgattttgactaagttccactggtgccagtcgccgtttgccgtaccgtttaccggaatgctttcaatacccgcgaagctcaaaagatactgcatcgctttggtatagccctcgcagaccgctttgttttccacaagcgctccatacagggtaaacggcctccaatcctgctctatttttttgacgtccgaggcataggcgcattttttcaaaagcgcgtcatgaaggaaaagctccctgtcatattcgttgaggcctgctggaagggaagaaacgatacggtttgccgcctgttcaatttgctgtgagtattgctcgatatcctgcgggcttagcatggagtacatctgtacaacctggtcgccgccgctttgcgtatatccaaacaagtttgcaagccagaaaatttcaggatggtcgtttgtaaacgcttcgattaccaggcgcagtttgtcctccctgaggcttgcgcccggcaaataaatttgttcaatcaggtattctccggaatcagaaggttcgtccgtcacaatataaacgtcgctttcgagccttttataaaaataccgctcgtcgtcgtccgtcagcgcgtcaaagccgtgcgtagtctgcagcctgtcgtaattgcttttaatgcgtccggacattccgccgaccgtattatagctgtagctgccggccgtgccgctgccgtccagctccacgctcgatacgggcgggcggtccgccggcgttattttttctaccgaagaggttacggcgtcggccttttcccgaacctccttgccggacatgccgcaggaagtacaaagagccggtatgagaatccaggaaagtatcgcgcacattgtatattttagatgtttcaacgggctttgcgcctcctttgcctgcttatacatacgtatgttttacttgaaaattatagcacagtgacggtttaatcacaacagagtaatttgtatgaaaaagaaaaatccccggttgaaaaaagaatggggataacagtgcgaaagcggggagaaaatacagtaaaatacacctgcgtactaccttttttattgcatttgttcttttcgttctgtccccttgacgaaagagattaaaaattgtaaaattaggaataattataaagggtgtttataggtttccggagatatccgaatagattccggcgattattcgtatggaacaagaagcgaggagagattttttttgaagacagaggcttttgagcggtatgaatccgaggtccgctcttactgcaggcattttcccaccgttttcacaaccgccaagggcgcggtgttttatgatgagcagggcgaggaatatacagactttttctgcggagccggcgctgtgaactatgggcataacaacgattatatcaaagaaaaaatgattgattacctcaaatcggacgggctgatgcacgcgctcgatatgtacacggtacccaaaagggaattcatagaatattttgaagaaaacgtcttaaagcccaggggccttgactataaaatacagtttaccggcccgacaggcaccaatgccatcgaggccgcaatcaagcttgcgagaaaatgcaagaagcgcagcaatatctttgcgatgatgggagcgttccacggcatgacgctcggcgccctggcgcttacgacggacaagtcctcccgcaggggggcgggcgtgagcctgacggatgttacgcatatcccggcgccctacatgttcccggagctggacacggtcgcttatatgaagcgcctaatcgacgacgaccattccggtgtggaaaggccggcggcgcttgtgattgagacgacgcaggccgagggcggtatccgcgtaatggataacgaatggctccaggctgttcgcaaattctgcgacgattacgatattatcctgattatagacgacatacaggtcggctgctgccggacaggtacgtttttctcatttgaacgcgccggtatcgtacccgatatggtaacgttatcaaaatccatcggcggctacggtatgcccttggcgcttacgctcttcaagccggagttcgatatttggaagccgggcgagcacaacggtacgttccgcggcaaccagctctccttcattgcggcgaaggcggggcttgaatatatgctcgaacacaaggtagaggaacaaacccgtgaaaagggcgagcttgtgcgcagctatatcgaaagggaaattcttccgctcgacagcaggctggagctaaggggcatcggccttgtctggggcgtcgattttgaaaagattccggtaaagggcttcagcgacaaggtgatagatacctgttttgaaaagcacctcattattgaaggcgcgggcagaaaaaattccgttgtaaagctgatgcctccgctcgtcattgaacaggagcgccttttacgcgggctttccatgctcaaggaagcgattgcggaaaatcttgctctgataaaataaacaggatgggtgggtacgccggcgacggcgtaccgttttttcggataaaacatagtacagaacaggggaacggatatgggcctgagggaaattacaaaaatggcgggcggcgcaagccttgataagatgaagggcgtcgtagaccatgtacatgaaaagactggaaagaacaaggcgtctatttttctcgatattcttaactgttccgcgcggtacggcgcgggctattacgactaccaaatttttgaattctacaatatgacggcgaagcagcgcgccacttatgtaacgcgggtcaaaaacaaaaagctgattcttcgtctcaataaccaggattacagctatatattcgacgagaaaaatgtatttgacaggcggttttcaaaatatcttggccgccaggtactcgacctcaagaatttgagctttcatgaatttgaggcctttgtgcggggaaaggattatttttttgcaaagccgtatattggggaaagcggcaagggaatcgagaaaattaaggtttcctccttccgcgatttggacgagctttacgcctatgttacaagcagggaaaagaatttcggcgtaattgaagaggtaatcaggcagcacgaggccgcggcgaggatttatcccgattcgctcaactgcctaaggattggtacaatcgtagagcagggagtgccgcacatcctatacgctgtattcaagatgggcaacaacggcaagtttgtcgataaccttgagaacggggggcttgcgtgccacttcgacctcgacaagggcgaaataatcgggcaggggcatacctcaaagcttatcaactacgacaagcatccctataccggcattaaatttttgggctaccgcctcccctttatgaaggaagtcaaggaaatggttttgcaggcggcgctcgaggtgcctcagatgcgctatgtcgggtgggatgtatgcctgacggaaaacggtcccgcaatcgtcgagggcaacgactatccaggctacgattttccgcagcttcctgacccggacaaacccaaaatcggccttcttccgagaatccaagaaatattgccggactttaaataagaacatacccgtgaagggggagcgcacgatgatactttccggtaaggaaattttaaagcatatgggcagggaaatcgtcattgagccgttcaatgagaaaaagattaacccgaacagctataacctgtcgctttctaacgagctgctcgtttatgaaaatgacgtactcgatatgaaaacgccgaacgcggtgaaaaagctcatcataccggaagaagggcttttgctcgaaccgcgcaggctgtatcttggaaggacaaacgagtttactaaaacggacaaatatatccccatgctggagggccgttcctcaacgggaaggcttggcctgtttatccatgtgacggccgggttcggcgacgttgggtttgcgggcttttggacgcttgagattttttgcgtgcagccggtacggatttacccgaacgttgaggtctgccaaatttattatcatgatatcgatggggaatacgatttatacagcagcggaaaataccagaacaacaccggcatacagcccagcctgatgtataaagattttgagcagaaataaaagctaaggccgcggaatacaattccgcggcctttattacgtattactgcctgccccaaagtgtaaaattcaagaattttagttgcccttccttgtacccgcctttgatatatccgggcaggtggcggtacaggacagacatacacagcagaaaaacagcgagcgtaaccgccgtgcttttatcaaacagcaggctcattgcaagcattgccgtgtagcttaccgccacgcgcaggctgtgcgggttgagccggaatacggtagacagaataacaaacggtattaccagccaccagaccgtaaaaaaccgcggcataaggcccgctaagcttccaaacgaaacgttgattgccttgcctcccctgagccgcagaaatgggctgaacgcgtgccctgccgtcggcgcggcaataacgagggcaaacagcaggctttccgggctgagcatatgggaggcgataaagacgggaacgtatcctttgaaaaagtcgagcgcaaggcaaaggatgcccatcggcacgccgacgtatttaaacacgttagcacagccgggattgccgtcgtcgctgatttttaggatatcttttttgaagaaaagcttgggaagaaaataggaatacacgatgcttcccgacaaatatccgattatggtgaaaaacagatagggtaaaatgtgttccatatcgaccctccctttctggaatatccctcataaccgcttcggaatattcgccgtcttattttaaattgccgattcttccagcagcgtgcagattttttccgccgcgtctggtttgatatgctcccgctggcgcctgagcatttgttccacttcgtttttatcatgcagaagctcataggcactgcgcgcagtgtcctgcggccggccgggacaaaaaagcgacaggccgttccgaacaaaaaactgcgcgttttttgtctcgcagcccgggatgggttcggtgtggatgatagggatgttttttacggcggcttctgtcgaggtaagcccgccgggttttgtaaacagcaggtcgcaggcgtccatataaagcccgaccttgtcggtaaatgggagcggcatgacattgggacagacggagaattcctcccgcagcgcctgcaaaagcttcttgtttcctccgcacagggcgacaatcgaggtcccttttccaaacgcgtgcaaaagcgcgtggacgagtgctgcgggttttccaaagcccatacttccagacatcagtagaagcgtcgttttattctcttcaagcccgagctcttttcttgcctgggccttcggtgtatgctgcctgtactttcccgatacagggatgccatacggcagaatcgtctgtttttttacacccttttctataaattccggtacgaggtcgacatggggaacgatgaaataatccggctccgtttccccccagaaggggatacaggtatagtctgtggcgacagccgcaaaacgaaagaacttgccgtaccgtttgcggatgcctgtcagcgtttcagcggggaaaaggtgcggcgtgacgaccgtatcgattttatggcggataagatactcatacaagcttttggcgttcagcttgttcgccgcgtagattggcgacttgccgtttaagcggctgacggcatcgcccgccttgtaaagcaggcggaacgtattcggggattttgtggtaatgccgacataaaggctgtttacataacgggatgcccgttcgctgccaattgcaagggtatccttaaattcgcaggggacttccctctgcttaaactgttcatataccgcgcgtccagcgctgttgtgaccttcgcccgtgttgcaggacaaaaccagtatattcaagaaagtatcatccttttcctgtttctgcccttatcttaacataattcgtcaaaaatgtacagacagcataataacgttgaaaagaaaaatagttgacaaaccattgggaaaagaatagtataaataaaaatcctatttattcagtcggaattggaggggattcccctgtgcccggcttgaaaggacgtggctttaatgaaaatttctacgaagggcaggtatgcgctgcgcctgatgctcgacctcgctttaaacgatacgggggaatatatctcgctcaaaagtattgcggcccggcaggagatttctgaaaaatatttggaacagattatcctggtcctgagcaaggcgggctttgtaaggagcgtgcgcggcgcaaacggcggctaccggctgtcaagggccgcgaaggagtacaccgtaggggaaattctgcgtctgacagaggggagcctggcgcccgtcccatgccttgaggatgaggaaaacaaatgcgtgcgcagcgcgcagtgtacgacgctgtatgtatggaaaaagctcaataaagcgataaacggcgttgtagacggcattacgctttacgaccttgtggaattggagcgccgccgcggagaaaacgactatgttatttaaaaatttataaccatttttttgaaaaagggttgacaaacgcttcttttgtggtatgataaatgcaatcaaattcctagttaacatataggaataataagaaaggcgctgatcccatgatttttcttttagaaaagtacctgcaaaccaaacgatgtatgccaaaggctgaacgaatgtgccggtgatttatcggcgtatccatattatgtattcggcaaggcaaacattttaattggaatgagggaattttattatgagtaaaataaatgagagaacgcttcattttgaaacaaagcagcttcatgtcgggcaggagacggcggaccccgtaacggatgcgcgcgccgtcccgatttaccagacaacttcttatgtgttccgcgactgcagccatgcgcaggcacggtttgggctggcggatgcgggcaacatttacggcaggctcacgaaccccacgcaggatgtattcgagcggagagttgccgctttagagggaggcgccgcggcgctcgccgttgcttcgggcgcggcagcgattgcctatacgctgcaaaaccttgcgcacgcgggggaccatatcgtgtcggcgcagacgatttacggcggcacgtacaacctgcttgcacacacgttcccagattacggcattgaaacgacatttgtagacccggatgaggaaggcgcgttcgagcgtgcgctgcgggacaatacaaaggcaatttttattgaatcgcttggaaacccaaactccacgcttatcgatatagagaaagtggcgcggcttgcgcatagccataatatcccgcttgtggtcgacagcacttttgcgacgccttaccttttaaggccgattgagtacggcgctgatatcgtcgtgcattccgcgactaagtttatcggcggccacggaacgtcgcttggcggcgtaatcgttgacagcggtaattttgactgggaagcaagcggcaagtttgaacacctggtcaagcccaacgacagctaccacggcgttagctttacgaaggccgcgggaaaagccgcgtttgtaacgctcgtccgcgcggtgctcctgcgcgacacgggcgccgcaatttccccttttaacgcgtttttgcttctgcagggcttggaaacgctctccctccgtgtggagcgccatgtggaaaatacaaagaaggtgcttgcctttttaaacggacatccgcttgtggagaaagtcaaccacccgtctctcgaccccaagcaaaggccgctttacgacaagtattttccgaacggcggcggctcaatctttacgtttgaaatcaagggtgatgaggaaaaaacaaagaaattcatcgacagcctgcaggtgttttccctgcttgcaaacgtcgcggatatgaagtcgcttgttatccatccggcgacaacgacgcattcccagttgaatgaaagggaactgctggaacaaggcatcaagccgaatacggtgcgcgtgtcaatcggcacggagcatatcgacgatatacgatacgacctggaagaggcttttcgggcaatttcttaaaaaggagcgatttactatgggacagatttataaaagcgtaacagagcttatcgggcgtacgccgctgatggagcttgcaaattttgaaaaggcacaggggcttcccgcgagaattttggcaaagcttgagtattttaatccagccggaagcgtcaaggaccgcatagcgaaggcaatgattgaagacgccgagcagaaaggaattttaatagaaggctccacaatcatagagccaaccagcgggaacacgggaatcgggcttgcaagcgtcgcgacggcacgcggctaccgcgtaatcctcactatgccggagacgatgagcgtcgagcgcaggaatttactcaaggcatacggcgcgcagcttgtcctgaccgacggcgccatgggtatgaagggcgcgattgcaaaggcggaggagcttaaaaacgaaatcagcggcgcggtaatcctcggccagttcgacaatcccgcgaaccccgcgatgcattataaaacgaccggcccggaaatctgggaggataccgacggcagggtggatatatttgtctcaggcattgggacgggcggtacattaagcggagcgggtaagttcctcaaggagaaaaatccgtctgttaaaattgtcgctgttgagccggagggctcgcctgtattgtctaaggggacagcggggccgcataaaatacagggtattggcgcgggcttcgtccccaaaacgctcgataccggcgtttatgacgaaatcctggccgtatcgaacgaggatgcgttccatactggcaacttgattgcaaaaaacgagggcgtgctcgtgggtatatcctccggagcggctgtatacgccgcgtctgtgcttgcgcgccgtccggaaaacaagggcaagaatattgtcgctatcctgccggacacgggggagcgttacctttccactccgctttttgaaagctgagcctgcccattataccgccccgcggcatgtaccaaaacacatgccgtggggctatttatataaatccgggctcatacgtgttcgttccggtttggaataaatgccaaaaatttgcaaacggctttacaaacggctgtgggcgtgatataaatagctgaagtaaagaaaacgattacaaaaggtaatcgtacggaggagtatgacgatgacagaaaaagagaagatgataagcggccagctttataaccccatcgatgaagaattggagaacgaccgcaaccgtgcgaaggacttgacttttgattttaataatctgaggccgtcgcaggggcaggaaaaatcggagctgattaagcggctgtttggaaagacaggggagcatgtctgggtggaacagccgtttcactgtgactacgggtataacatcagcgtgggcgagcatttttacgccaaccacaattgcgtcattcttgactgcgcgaaggtaacaatcggacatcatgtgtttttagcgccgaacgtcggcatttacacggccacccatccgctcgacgccgagacgcgcaaccagtttattgaaaacgcaaagccggtaacaatcggcgataatgtttggattggcggcggcgtgaccatcgtgccgggcgtcacgattggcgacaacacggtaatcggcgcgggcagcgttgtcgttaaggatattccgtcaaacgtgcttgctgtgggcaatccatgcaagcccataaggacaatcacgccggaggaaaagaaagagctggaaaaataaaacggcgctctgctgaggattgacacagataaacgccggtgttacaatatgatacatacagggagcgcggcggtttgtaagggtttacagacaaagcgttccttttttgttatagggaggaggatgcgctgtggagcgggaaaaaattatccatacgattgagccggtttacgatgaagcgtcacgggttttaatcctcggcacgatgccgtcgcccaaatcgcgcgaaatcgggttttactatggccatccgcagaaccggttctggcgcgtgatggcagcgctgttttcctgcgctgtacccgcggcgaacgaacagtgtaccgccttgcttaaggagaatcacattgcgctgtgggatgtgctcgcttcctgcgatattgcgggcgcggacgacgggagcatcaaaaatccggtgccgaacgatttaaacagaatcctcaatgtatcggacatacaggcggtttttacgaccggaacaaaggcgtatgcgctttataaccggctatgcaggggcaaaacagggatagaagccatcccgcttccctccacaagcccggcgaactgccgttattatacgtttgaccagcttgtggagcggtatcaggccattatggattatttacggggatgacagattatgaagctatcgatagatgaatgtacagcttgcccgagaaactgcaaggcgtaccgcggcccgcgtgagggagagggcttctgccgcgcgggaatgctcccaaaggtcgcaaggattgcgccgcattactgggaagagccgtgtttaagcggaaaaaacggcagcggcgccgtctttttcagcggctgtacgctgcgctgcgtttattgccagaactatgaaatttctgcgcggggctttggcaaagagatgacgccgaaggagattgcggaaggctttcaaaggctggaagaacagggcgtacataacatcaatttggtgagcgcgtcgcactatatcgacgcggtgcttgaaagcctttcgatttacaggccgcgtgtgcctgttgtgtataactgttcggggtacgaaagtgtggagagccttagaaggctcaaaggatatgtaaacatttacctgccggattttaaatatgccgacgatgaaatggcgctgcgctattcctcagcgcccggctaccgcgatacggcgattcgcgccatgaaagaaatggtgcgccaaacggggaacccgcgttttgatgaaagcggcatgctgcaaagcggcgtgattgtacggcaccttgtcctgccgatgaacaccaaaaacagcatagccgttttggagctgctcgcaagggagttcggggatgaaatactcgtcagcctgatggcgcagtatgtgtcctgcggccaggcggaaaggtacccggaaatcaaccggaagattaccgcgcgtgaattccaaaaggtgtcaaacaggctctttgagcttggtctcgacggctttgtgcaggagcgtggggcggcggacaagggttatattcctgattttgacctgacaggtattaaataaaagggggagccgtggcggctccccctttttaatctgccttttctttgtgaagcctgcttcttggcttttttgagaaacgccccgtttcttttttattgaatgaagctttcaaagaaggaaccgtcaaaatggttccttcttactttatgaagcatcctgcttctctctttttaaagaaagccatctgcttcttgggtttcttgataaaactttatatgtttaatcaaaagggaaaaacaatccgctgtttttcccttttgtaaacccttttcgtcggtacaagggaaccctttcgatgggttcccttacggcttacgggcggcgaagcatcgcgccgccctccgcctatccctccacagccgattcaaggagcaaagccccttgaaaatccctctaagaggaaactatccgctcctcgttttatgtacggagtgtagaacagatactgcgggacgtttcagcgccgcgccttcgcgcggagtacctcgcggggttggtactttcttggtatgtggagtgctttgtgagcggtacttttgcgcggctttcgccggaatggtttatatgccttccacctgcttgtccgtatggtacgctatgcccacgcaatgcgtgagcgtttcttttatctgaccatatgcttttttaatggtttcttcacgggacggcctgccgccgcttaccgcaaggctcccgagcacaaagctgtgctttagcgcctgccattcttcaggagaaaggcgcggttccctgagcgcctgcatccgctcaaagcagtaaagggcatagcctatttcgtccagcttccggtagctgaaatcgaggtacagctcttcgcgttccgtttcgccctgtaattcttttccttcggcgcaaagcccctgacggtgcgggtcttccgctatccggtgcaatagcccgtttagctcttccagatagctgttatgtatcacagagaaccccttctttccgtatgccgtccttccgtgccgcctgtttctcctgcatgcctaagctcagctccaagcataaggcaatcatatcgcagccgctttcaatctccatctggctgccgcaggaggaaaggcttgccgtcaaacacgcaaggcaaaagtaatcctcatattcgcagtcgccaaacggcaccacatcaaacgaacggaatacatagaacgctctgctcgcaaaccctattttctcaagcacgtccgcattaagttccgtttcctccaatagctccgaaagcagcttcttttctactgcttcacccataaacatcctccttttagtttaaagcctatatttaaataataatacaatactagttgtttgtgggcaaaaaaacacagttccgtgttttgacgaaaatttagcataaatgaataagtaccactcccacaaagtactccgcgcgaaggcgcggcgcacagcggtctcgtactatcattactacactctacatataaaacgaggaacggatagttttctcttagggggattttcaaggggcttcgctccttgaatcggctgcggagggataggcggagggcggcgtgatgctttgccgcccgtaagccgtaagggaacccatcgaaagggttcccttggaaaagcgctcgaagaggggttacaaaggggaggaacagccgcaactgttctctcccctttgattgaacataaaagttttatgaaagaaaccaagaaacggtacgtttctcaaaaacccaagaagcaggttgcttcaaaaatatgaaaaagaataaggggattggaataatgcattttccccctctttttctcatagaaaaaaagaggagaaccattgcttttgcggttgacaaacgcacctgcgtgtgatatgctttttacataggattgttaaattattaacaaagattttgcacaaaaaacagccgtgaattttggaaagggaaagaagcaaaggtccttgcttttccattgactaaatgaaaataactgatagaatgataaccggagaatcaaacgatttttgacgaaaaggggtgaaatctatcatgaaggtatacgtatgtgtgggaagctcctgccatctgagaggctcgtacgacatcatcaacctgatgaaggaaaggctcgaggaaaacggcctggccgataaggttgagctgagcgccgcgttctgcctgggaaaatgtacggagggtgtttccgtcaaggtggacgatgaaattatatgcggcgtaagcaaggataacttcgacgaaatgttcaatacatatattctgcaaaagcagggcaagtaacggcttttaaaattcggcgcagataagggggagccgctttgggcgattgtatccagctaagaaaatcaaactgtaagaactgctataaatgtatccgtaactgtccggtcaagtcgattcggtttgcgggcaaccaggcgcatatcgtaaaggatgaatgcatcctgtgcggcatgtgttttgttgcgtgtccgcagaacgcaaaggaaatccgcaacgacgtcggcagggcaaaggagctgattgcaagcggaaggcctgtctatgtgagcgttgccccgtcgtttacggcaaattataacggcgtgaatatcgcctcctttgaacagtcgatgaaaaagctcggctttgccggcgcgtctgaaacggcaatcggcgcgaccatcgtaaaaaagcattacgacgaaatggtcggcagcgcaaagcacggcgtcatcatttcctcctgctgccattctatcaatacgctgatacaaaagtattacccgcaggcgctcccgaaccttgcgcgggtactgtcgcccatgcaggcgcattgtacgcagattaaaaaagagcatcaagacgcgtacaccgtgttcatcggcccatgcatttccaaaaaggacgaggcggagcagtatcccggcatcgttgactgcgtgcttaccttcgaggagcttactgagtggatgaaccaagaggggattgcgtttgaacaggcacaggacaaggttacgggcggcaaggcaaggcttttcccgacgaccggcggcatcctgcgcagtatggcctgcgacaaccctgattacagctaccttgccatcgacggcgtggagaactgtatgaatgcgctcaaggatattatagcgggcaggattacgaactgttttatcgaaatgtccgcctgtgtgggcagctgcgtcggcggcccggcgatggataacccgcacaaggagccggtgcgcgactttatggcggtcgaccggtacgcgccgaaaacagaggacttttctatctcgatgcccaaggagagcgagctcaaaaaagacatggcctttgtcgggctgaaccggcagatgcccggttccaaggcgattgaggaaatcctgcgcaaaatgggcaagacaaagcccgaggacgaattaaactgcggctgctgcggctacaatacctgccgtgacaaggcggtcgccgtctatttcggcaaggcaaacctgacaatgtgcctgccttatttgattgaaaaggcggaatccttctcagacatcatcatcaaaaacacgctcaacggcattatggtattgagcgaaaacctggaaatccagcagattaacgccgccgcgcgcaaaattttgaacgtcggcagggtacaggacgtcatgggcgagccggtcgtgcgccttctcgacccgcttccgtatatccaggtgctgaacgacggcaggaatgtgcacgacaagcgcatctatcttgcagaatacgataaatacgtcgaggagtccatcctctatgacaggagcttccatatcctcatcagcattatgcgcgacgtgaccgatgaagaaaagcagaaggcgcagaaggagtcgatgagcaggaacacggtggaaatcgcggacaaggtgattgagaagcaaatgcgcgtcgtgcaggagattgcttccctgctcggcgaaacgacggcggagacgaaaattgccctgaccaagctgaaggagtcgttgcgcgatgaataacctgtgcaccgaaatcggataccacagccttataaagcacggcgaacagctgtgcggcgaccatgtagaggtcgtagagcagggagaaaacagcttcgtcatggtgcttgccgacggtttgggcagcggcgtcaaggcaaatatccttgcgatgctgacctcgaaaatcatctctacgatgatggcggcgggattaggcattgaggattgtgtggaaacgatagcctctaccttgcccgtgtgcgaggtgcgcaaggtagcgtattccacgtttaccatcatacgcatcgtagacaatgaagaggcggaaattattcaatacgacaacccccatgttatcttcctgcgcgacgggaagaacgtggaatacgataaaacgttaacggaaatcggcggcaagcagatttacaaatcaaaaatcagtttacaggaaaacgatgtgtttatcgccatgagcgacggcgcgatatacgcgggcgtcggcaagacgatgaacttcggctggcagcgcgagcatatcgtcgagtttatggaaaagctctacgacagcgagtacaccgcgaaaacgctctgcacgctgctgcttgacgaatgcgacaggctgtacgcaggggagccgggcgacgacacaaccatcggcgcgctcaaaatacgaaggcgctcgccggtaaatctccttattggcccgccggtcgacccgaaggacgtaaacaagatgatggcgcttttctttgcaaaggagggcaagcacatcgtaagcggcggtacaacttctaagcttgcggccgaatatttgggtaagccgatgcaagcgcagattgattacctcgacccggaaatccccccgactgcgaaaattgagggcatagacctggtaacggagggcgttattaccatcagccgggtgcttacctatgcgaaaagctatttggagaacaacgagttttattccgactggagctttaagcaggacggcgcgtcacaaatatcgcgtttgctttttgaagaagcgacggacatcaacttttatgtaggcagggcggtcaaccccgcgcaccagaacccgaacctgccaatcaatttcaatattaagatgaatttaatcagcgagctgagcgaatgcctcaaaaagatgggcaagcgcattaaggtcagctacttttaaggatacggcaccaggggaagcatgggctttcgtgcggaaaggaaggtattgcagatgagaaaatttgatacgaaggtacagtacttaaaatataaggtgttacgggaggttgcacgccacgccttcaacgatacgctgctcgaaagctttaacgatatcgcgaaggtcatcgtcaagggacccaagcccaccatgcgctgctgtatctataaagaaagggcgattgtcggcgagcgtatgaaaatcgcgatgggcggcgacaaaagcaacccgaacgtcatcgaggttatcgacattgcctgcgacgaatgcccggagggcggatatatcgtcaccgaggactgccgcggctgtattgcgcaccgctgtgaagacgtctgccgccggggcgcaattacattcgacgagcaccagaaggcgcatatcgataaatcaaaatgcgtcgaatgcggacaatgcgcgaaggtctgcccatacagcgcgattgcaaaccacaagcgcccgtgtgagcgtgcctgcaaggtcaaggcaatcggcgtgaacgaagagacaagagccgcgaaaatcaattacgacaaatgtatttcctgcggcgcttgtgcctatcagtgcccgttcggcgcaatcgacgataaatcgtttatcctggaagtaatcaagctcatcaaggagagcgagaacaatacgaaatataagctgtacgccgtagtcgcgccgtcgatttccagccagttcagctacgcaaagcttgggcaggttatctccggcattaagcagctcggcttctacagcgtaatcgaggccgcctggggcgctgatatggtcgcctacgcggaggcgcaggagcttgccgaaaagggctttcttacaagctcgtgctgccctgcgttcgtggactatatcaaaaagcagtttccaagcctcgaggaaaacatctcccacaacctttccccaatggcgacgattgcaaagtatatgaaggatgccgatgaggatatcaggattgtattcatcggcccgtgtacggccaagaaaatggaattcaggcaggagcgcgttcgcccgtatatcgacagcgtcatcacgtttgaggagcttcaggcgctgattgacagccgcgatatcgatatttcttcccttgacgaggacgtgctcgacaacgcctcttattacggcaggattttcgcccgcagcggcggcctttcagacgctgtcgcgcaggcgctgaaggaacagggcaacggagaatttgagctcaacgcggtcgcctgtgacggaattgaggaatgccgtacggcgctgttaaaggcctcaaagaaggtactgccgaataactttatagaaggtatggcgtgcgtcggcggatgcatcggaggcgcgggctgcctgacgcatggcgcaaaggataaaagccaggtggacgcctacggcagggaagcatacgaaaaaaccatcagcgacgccatcggcgtgctggaataaaaattagatatgcttgataaaagacgcgggaatggcgcagccattcccgcgttttacggtaaattattatatcgatatcggaggctgggatggcagacggtttcgattacgcctgccagattcatctgcaatacgtatatttttcatttcaatcaaaaaaatacaaaattgaaacaattgtacaaacctgtaactttatccaaaagaaagcgttacaattcagtaaatattcacactagcattccacgctttgggtgtggtagaatattacatgcagtattaaagtaacgttttttactccaaaattcgactatttgtttaatttgtggttggtgttgtatatggttaaaacaaaacggctcgttgctttttatcttgccgcgatggtgttgttaacaggtttgttctttatttttacccttccggcgcaaagcgcgacgtttaccgcgcgcctgtctgccccggcgggcagcaacaaatattattacaacgcggattataatattttctatgcggcgggctacggtatgccgaactgcacagcttatgcatacggcagggcgtatgaaatcctcggctcccgtccgaacctatgcccgtacaatgcgggggaatggtggagctataacattaaaaacaagctctatgcatacggccaaacgcctaagcttggcgctgtcgcatgctgggataattatgattcagatacaggccatgttgcggttgttgagcagatatcgggaaagaacgttacgttctccgaatccgcatatggctcgacgaacttcttcacccagacggtcagcacggacgacagccacatggggtacagccggtaccgttttctcggctatatttatattggggaattcagtgattcctccaataatcaaaacacacctgcaccggcaccctctcaaaaaatcaaaactgaggtctggaaggttgcttcaagcgatggcctgaacctgcgttcagcggcagggacaagcagtacgaggcttgctacaattcctaataacgcagcggttaaaattacagaaaaaaaggatgcggaaggctatacgtggggcaaaaccacctataacgggaaaacaggatggtgtgcgctcaattatgcgaagaaggccggcctgctcggcgacgtggaccaaaacgggaagattgaggtaaatgacgcaatccttctccagaaatatattggcaagactgtgaacctgaacgcaacgcaaaagcttctggccgatgcgacgggcgcgggcaaatacagcacacaggatgtcatgcagattcaaaaatatttgggcgggtatctcctggcgctttaattttataaaacaaaaggacggcaaaagccgtccttttttgctgccttttaactggctgcggttgtttttttgcaaggatattctgcgccatcaggacgtccgctacagacagtatgccgtctttatttaaatcagcaacgtcgtctataatatccttatcgatgttgaccatgtttgcgatgtgcttctgcatatctataatatccgaaacggtgagcacaccgtcgccgtcaatatctccgccggtttcttccttggaaacaacggctttaattacgagtgttccgccgatgtcatcgttctgctcccttttataaaattccatcagctctgtcgcttttccttcaagaaacaaatagctgtcgccttttttcgtatcgggtaaaaacgtaatcctgcctgctgtcgtattttcaagccattctcctacgccgagggagcagctccggcctgtgccggcggcgtctatggttacaccgatagccgcttttccttcgggcgcttcaaaacgctttgtcccgcagttgatatatccgctgtaaggaacagtacccttagcaagctcaagccattttccggtatcctccgtgggaattccgttttgaagcgggatataatgtacagtgtattgcgccccggcgcattcgctttcaaatataacctgttcaaccctgttacagccgccggaaaaatcaaacacattagaatatgtaattttgttttgatagtttttattgccgttttcctccttataaacggtcatgtcccaggtcgcgccgtatatttcattttggagcagccgccagctgcgcttgattttctgtactttcgttatagcgtaatttttaccgaaccgcttactgaacaggtacttgtcctcataagaaatccagtaacagccgttttcaccgcgtccggttccccagctgcttttgacaagccaggcgccgtcgttttccggtcgggagaacaggttgaaacgctccttaggaaagctgtcgtcccagccgattaccgcgacgacgtgtccctgcgtatcggttccgggtggaatatcgtcaaggcaggcaaacgcggtgaggtcgcggttgaaatatttccgtaaggtactgcacccggcggtgacgctcccgtaatcgagcacggcgcgcttaatcgtcgcgcgctcacccgacaggaaaataagcccttcggtgccgaagcttgttttacctttatcgagctggggaaaggtaaggccgtctccgctgcggtatgggatttcactttccaggcgagggccgctccatgaggtcaggtatcccggaatcatctggctgtagccggcgtcataaaagctcctctgccagcccgtaccgttttgacgctttgcagaccagtggtttgcgtgctcttcggacaaatcgtatgctccaaacccatttttgagcagggcggtttcgaacgaagacagccccgcaaaaacccagcaggtattgagattgccctggtttttcgcaggtgttacaagcccgtattctgctgtgttgtacgaggaaggaagggtgccttcttcttcgcccagtacggtagtacgcccttcatactgttggggtacgaccgcattcgataaagtgcctgccccggcgcgctgataatcgcggtattctttggtgatttccggccgttccatgcggtaagccgaaacgtttgtttcctgtgcggaaacaccggccggcatactggccgatatgcagagtgcacaaacaatacacacgctccatgcgcggggaaaaaaccgttttttgataagaaaacccccaaaaccgtatttatagctgaaaacataaaattatttcttttgtcaatacttattttatcagcagggcggaaaaaagtaaatacggtatttgccgctatgtagagtattttcagatagaaaaggagcgtttgctatgcaggtaaggacagaccttgcattggaagcaaaagagattgccggggaaaagataagcggcgtcacatacgacacggacgactatgaaaacatgaaggtcacgcgcatgcaggtgcaaagccgggaagcggcggaaaagcttgggaaagacaagggcacatacattacaattgaactccctccgcttacagatgattttaaagagaccgacgagcgcttggagattatcgcggatgaaatccgtgcgcttctgcctgaaaagggcctgattctcgtagcggggctcggaaacgtcaacattacgccggacgcgcttggcccaaaggtcggctcgcaaatactggcgaccaggcatattaccggcgagcttgcgcgcaccacggggctcgacgccctgcgccccgttgccgtactcgcgcccggcgtgctgggacagacgggtattgaaacgggcgagctgcttttcagtgttgcggaaaaaataaaaccatcggctgtcattgcaattgacgcgctcgcctccaggcggctggagcgtcttggatgtaccatgcagatttcggatgcgggcatctcgccgggcgcgggcgtcggcaaccaccgcctgcgcatcaataaagaaacgatgggtgtgccggtcattgcaatcggcgtgcctaccgttgttgacgcggtgacgctcgcggccgacctgctgctcgacagtgatgacgaaaccctccgcttcgtgcgcagcgcggtgtcgccgcacgggcaaaagatggtcgttaccccgagggagatagatttgctgatttcccgcggctcaaagcttatcagtatggctgtcaactgcgccctgcatccggattttgaactctccgacctgctttcgctcgtcggctgaatgatatataaaactggtataaataaaataaagagagcataaggttaaggtaaggaacgatttaccgtgggtgggggattttatgcttgaaaaatataaaaaaagaatcattcattcaacggcggcggttttgtcctgcgcggtgacggttttgtccctcgtatgcgtgggggcaaggctgccgtctgctctgactggccaaacgcagaagctgcagctttttgcggcgggccttgcaatgcctgacggctcaatcgaccaaaatgaaacggattctgccgcgcctgccgcttcttcctcctctgaaacgaaaaacaaaggtaccgaaaaagacgagacggaaaagccgacggccgccgcaacgcagcctactacatcggaggatgaggcggcgcacaaaggggagaaaaaattcccgattacggaatgccagtatgggccgtccggcgtccagtatgataatttttctatcaaaaacacgacggattacgtaatcaacgttggtgaagagctccaggcgccgcttggatttaaaatggaaaaaacctcggagccgcaggtgctcatcgtacatacgcatacctgcgaatcctacctgtcgcaagacctcggctggtattgggagaactactatgccaggaacaccgacgataattataatgtcacgcgtgtcggcgcggcaatcgtagacacgctcaattcccatggtatcggcgcggtgcacgctgtggagcatcatgacgacccttcctataacggcgcttacgacagaagcgaggagacaatctataaatatctaaaaaaatatcccagcattaaggtagtcatcgacctgcaccgtgacgcaatcggctacggcggggaagccggaaaaattaagccgacatttgttgcggacggcaggaaagcggcacagattatgataatgacaggatatgacccaaccggtgcgtacggcttttccgactgggaatataacctgcgctttgccctgcgcgtccagcaaacagcggaatcgctttatcccggaatgaccaggccgatgaatttcggggattttgcatacaacatgtttatcaatacagggtcgcttttaattgaagtcggcaccgacgtcaatacattggatgaagcagtctattccggcaagcttctcggcgatgtactcgcacaggtactcaaaaacgcaaaataaatacacggcggcccgtcaataaaattatctatagacaaacggggacgaatatgcttataatggaacatgataaacccttcctgtatgattttaacaggcagggagcataccagccggcaatgattgccaaaaggaaaggacacggaaatgaagttgaaaaaaatggcgccgattgttcttgcggcagtccttttgattagcgcgtttgttttttctgccagggcgcttcctgaagatgagagcggcacttccgcggtggaaacccagccgcctgtatcttcacaggagcctgaaacccagccgccccctgaaccgaccgctcctccctacagcgaaccggaaccacagcctgagccgtcttcctcccaggaaccggagtatacagacccgccggctgcctcttctcaaacgcaggcgccggattcttcagaagaagaaacacaaggccagaaatcctggctggatatcttcaagctgcccactgaaccgacgaacgaggacgcatccattcccgaaaaaaaggatacgcagaccaccaccacacagtatgttgtaatgggaatactgctctgggtactaatcgcatgcggaacgctcgtaacgcttggcgttcttgcaagcacgcacagaaggaaacacgggaaataaacgtataggccgtatatggagcaaaacgccccatatacggcattctttatttagagaagccaaagaatgcacctgttgaaattgacaagctttcctgatatgttataataataacctcacgccgcagggcggaagccttgcaaaagcaagccttccggcggctgggagaacattgaaactggtacggaaagcttagggacgctttccttgcagaggagccgcccgctgcgcggtcgtttatcctgttataataacctcaccgcaggcggaagcgaagctcccggcagctgggagaaaattgaaacacatgcagggacggcggtgccgtccctcttgaaggaagcaagcccgcagggcttgctgatgtgctgtaataaccccacgccgcaggcgggaaaaacgctgtatactaattagaaattgtatgggaagaataaaattcagtatcattacgacagctaaggagaggtgaaacaatggaacaaggttcttcaaaacacgaaaatacccaaccggaaaaacagcttccggaaaattccgcagaaaaccagggtgacgaaatcgaccgtattatagaggaaacgcggcaggacacaacggggaatgatagctttgcgcctgagcggcagacgcctgagattaacatcatcggaatcgaaaagcaggaaaaaaagaaatacgcaaaaatgaaagccgcgaataaaaaagaaaaaaagcctggcggagacaatacaagctttgcttatggacttaatttctataagcttttctggattttttttattggctcgtttatcggcgtagtggtggaggttattttctgcctaatcgtcgaccatcggtacgaatcgcgcagcggcctcatatacggcccgtttaatccggtatacgggttcggcgcggttgtcatcactatggcgctttactggctgcgcaacaagcgggatatctgggtgtttatctgcgggggcctgctgggcgccgcgttcgagtatgtgtgcagctggtatcaggagacgttcctcggcaccgtttcctgggattacagcgactcttttatgaatatcaacggaagaacgaacttgatgtacgcgcttttctggggcctgctatccatcgcgtggctcaagtttatttatccgtttatgtcaaagctgattgaaaaaataccgaataaaatcggcaaaggccttacatgggtactggttattttcatggcgctcaactgcctgatttcagctgcggcagtcaacagaatgtccgcgcgccatgagggtgttccggcaagaagcagttttgacgtgtttcttgacaagacgtaccccgacgagtttttgaccaaaatatacacgcatatggcatattccgacgggacggggactgaagaaaagttggaacagccgaagccgcagaaggacggggagcctgcgggaaatccttcggatacttccgccgttgactcttcgtctgctccgctgtctccatccgaataaaagaggggtttcatggaaatagggaatgtaaaaattgaaggctgcgcctgtcttgcgccccttgccggcgtagcggaccgtgccttccgggagctgtgccgcgattttggcgcggcgtatacggtaagcgaaatggtcagcgcaaagggcgtttcttataaaagcgagcgctctacggagctaatggagcttacgcatagggaacgtccggcggctgtccagctgttcggctgcgaaccggaaacaatagcgtatgccgcaaaaacagccatgcgctatctgccggagtttatagacatcaatatgggatgtcccgccccgaaaatcgtaagcggcggaaacggcagcgcgctgatgaaacaaccaaagctatgcgcccggcttgtccgggctgccaaggagtccgtcccggttccgattgcggttaaaatcaggaagggctgggacgacgggagcgtcaacgcggtcgaggttgcaaaatactgcgaagaggcgggagcggccgcaatcaccgtccatggccgtacacgccagcagttctatgctgggcaggccgactgggaaattatcaaaaaggtaaaagatgcggtccaaatccctgtgattggtaacggcgatgttaccaccggcgaaagcgccgcgcgcatgtatgaagaaaccggctgtgatatggttatggtcggcaggggggctctgggcaacccctgggtgttttcacaaatcaacgcgtggctttccgaaatgcgtgttgtgccgccgccttccatggaggaacggcttaccgtcatgcgcaggcatattatgaagatttgcgcaaacaaaggagaagcgcacggcatgaaggaggcaagaaagcatgtcggctggtatttaaaaggttttcgcggtgcggcgcagttccgcggcgcggcgggaacgctttcttccgtcgaagatttagataggttgatttgcagtgtacaccgccttaacaacgtttaaacggaaacagcttctcaacaaggcatcatcattttggtatgggtggatttatgaaaaagaaattactttgcctgctgctcgcgggcgttatattgctgacgcttccgtcctgctcaatcgcgggggcgtttttatttggaatttcgcgcctctctccgggagaaacagaaagcgccgctgctgtgcaaagcgcagaaaaagagtccgtaaccgagccttccggaacgcaggggtatgaatatccgcacaggcgcattgaaaagctcgattacagcaagcttacagcggaatatcaatttaagaatcatccttacggctttgattcacttgaagaaggggaagaacgccgtctttatcaatgtattatggatgcggcttatgatattgcgcaggaccacaaggcctcttattatgattatgactatgaagcgggaagggtagaaacgggagcctcgttcagcgacatccgtttttacaaggtactaaccgcgtttttgattgataatcctcagatattctggataaacagcgattatgatttttacgacgaaggcggcaggcgctattttcagctgtactcatttgtttccgcagataaagcggaggagctccagcagaatttttatcagagggtcaaagaaatcataaagggtattccaaaggggctggatgaattcggaagggaactgtatctgcacgattatttgattgacaactgctattattttgatgggacatacagctggctgcgccacagcgcatttggcgcgattgtccagggctgggctgtctgtgagggctacagcgaagccatgcagctgctccttaacctggcagggattaccgctacagtcgtctatggggattcagacgatgttctgcacgaatggaatcttgtgaaaataggagaccagtggtaccatctcgatgttacctgggacgatctcgacaaggaggaagaacatagcttcaaccggtattgtttcttcaatgtgagcacttcttttattgagaaaaacgaacataagctatctccagattataacgatatgacggaggagcagatatttaaccccggtgaagagttcatggaacagttcaatttatttctgccgcaatgcgactcaatggaggacagctatttttataaaaatgcggcttttatttcttcaattggcagggaacagagcgttttagagcatttaattcagactgccagaaacaaagagccgtatttctatatttggtgcagtgacgcactcgataccgattatgtatataattgtttttttgacagccagtcctattacgattattttgattatgtggatgaggcaaacgccagcggaagaaccggcgggaattggcttaacaatgattctgtacagacatatgggtatgacagctacgataaattgattatcattgcgctggaataccagtagtaaaaaaacgccggatttgcttccggcgtttttatgtaaaaaatttcaaaaaaaagaataaaatacctattgacagggcaagctgtaatatgtataatataacagctgtccgagaggggagacaagggaaagcaaaagaaagataaaaaagcccttgacaaaaaggagtgtatgtagtaagataatatacacgccgctcggagaaggacgtgctttttttacctgtggaagcaggcggaaaaagacggattttgcagggcagtacaggaccttgaaaattaaacaacgcaatcatagtaaagaaacccgtaatactttgagtggggaagcgaaagcagtactcacaaaaagaagagaggcgaaactctaaaaaagacgcggtgaagaaaacacggaaaaattgaacgatacgtcaagtgtcgaaatgagcatcaaagctctggaatcggtagtaacccgaaagggttaatatacaaattttagagagtttgatcctggctcaggacgaacgctggcggcgtgcctaacacatgcaagtcgaacggagttatttaaatagaacccttcggggtgacgttttaataacttagtggcggacgggtgagtaacgcgtgagtaacctgcctttcagagggggataacgtcctgaaaaggacgctaataccgcatgatatatttgtgccgcatggtatggatatcaaaggagcaatccgctggaagatggactcgcgtccgattagctagttggaggggtaacggcccaccaaggcgacgatcggtagccggactgagaggttgaacggccacattgggactgagacacggcccagactcctacgggaggcagcagtgggggatattgcgcaatgggggaaaccctgacgcagcaacgccgcgtgaaggaagaaggttttcggattgtaaacttcttttctaagggacgaagaagtgacggtaccttaggaataagctccggctaactacgtgccagcagccgcggtaatacgtagggagcaagcgttgtccggatttactgggtgtaaagggtgcgtaggcggcaatgcaagtcagatgtgaaatgcacgggctcaacccgtgagctgcatttgaaactgtgttgcttgagtgaggtagaggcaggcggaattcccggtgtagcggtgaaatgcgtagagatcgggaggaacaccagtggcgaaggcggcctgctgggccttaactgacgctgatgcacgaaagcgtgggtagcaaacaggattagataccctggtagtccacgctgtaaacgatgattactaggtgtggggggtctgaccccttccgtgccgcagttaacacaataagtaatccacctggggagtacggccgcaaggttgaaactcaaaggaattgacgggggcccgcacaagcagtggagtatgtggtttaattcgaagcaacgcgaagaaccttaccaggtcttgacatccagctaacgaagtagagatacattaggtgcccttcggggaaagctgagacaggtggtgcatggttgtcgtcagctcgtgtcgtgagatgttgggttaagtcccgcaacgagcgcaacccttgctgttagttgctacgcaagagcactctaacaggactgccgttgacaaaacggaggaaggtggggacgacgtcaaatcatcatgccccttatgacctgggctacacacgtactacaatggccgtcaacagagggaagcaagaccgcgaggtggagcaaacccccaaaaacggccccagttcggattgtaggctgcaacccgcctacatgaagtcggaattgctagtaatcgcggatcagcatgccgcggtgaatacgttcccgggccttgtacacaccgcccgtcacaccatgggagccggtaatacccgaagtcagtagcctaaccgcaaggagggcgctgccgaaggtaggattggcgactggggtgaagtcgtaacaaggtagccgtatcggaaggtgcggctggatcacctcctttctatggagcaaagataaggtgaaaaagacttatctaatccaaggtcaggttatgggaagtaaagaaaagagagcgttgtttaattttgagggtcttgggaacaagatcttcaaagtgaagataaagacgggggtatagctcagctgggagagcacctgctttgcaagcagggggtcagcggttcgatcccgcttatctccaccagcgggtgaccccgcgggacatgacgtgccagaggcttgaaagagcggaagacgcaggatgtcgcggagggaagcccacaaaaacggataacaggaatggaatctgtggaaaaggctgaagtagaagaacagccggcaactcaaaaggatatgggcttatagctcagccggttagagcgcacgcctgataagcgtgaggtcggtggttcgagtccacttaagcccaccagcgggtggccccgcgggacacgacgcgccagaggcttgaaagagcggaagacgtagaatgtcgcgaagggaagcccacaaaaccgaataacagaaatgttgttcagcgggtggccccgcgggacacgacgcgtcagaggcttgaaagagcggaagacgtaagatgccgcgaaggggaagcctacaaaacggatgacaggaatgttgcccaaaaagcgaacaggccggaaagggaagcggaagcataactggaagggctgggagcgctgcaccttgaaaactgaataaagaaagcagaaaagcgaaaaagatgtaatgaaacgagattagagattcatgaaaatggatcgatttttttaatcaaaggtaaattactacaattagcaaaaagcagcaagatagcagaaccaagagaaactcacatggtcaagctacaaagagcacaaggggaatgccttggcaccaggagccgaagaaggacgcagctaactgcgaaaagccacggggagccgtaagcaggcgctatatccgtgggtatccgaatggagcaatccggctggagtcatgtccagtcatcctatactgaattcataggtataggaggggaaccgcctgaactgaaacatctaagtagggcgaggaaaagaaatcaaccgagattccgctagtagtggcgagcgaacgcggaagaggccaaaccggaggtagtaataccaccggggtttggacagcataaggtacgcaagcgcttaggagaaaggtatgggaaggcctgccaaagaaggtgagagccctgtatccgaaaagcgtaagcggctggctgtatccagagtaccgcgggacacgtgaaaccccgtgggaagatggggggaccatcctccaagcctaaatactacctggtgaccgatagagaacagtactgtgaaggaaaggtgaaaagcaccccgggaggggagtgaaaaagaacctgaaaccttgtgcttacaagcaccgagagcccgtctaagggtgatcgggtaccttttgtagaatggtccggcgagtgaatgtatctggcaaggttaagcacttcaggtgcgcagccgtagcgaaagcgagtcttaactgggcgcataaagtcagatgtattcgacccgaaaccgggtgacctacccatgtccaggttgaagtggaggtaaaactccatggaggaccgaaccgactcccgttgaaatggtagcggatgaggtgtgggtagcggagaaattccaatcgaacccggagatagctggttctctccgaaatagctttagggctagcctcgaaatagattaccggaggtaaagcactgaataggctaggggccgagaggttactgaaccttatcaaactaagaatgccggataatcgtttttcgggagtcagacagtgggagataagtttcattgtcgaaagggaaacagcccagacccacagctaaggtccccaagtatcattaagtggaaaaggatgtggggttgcccagacaaccaggatgttggctcagaagcagccatacattaaaagagtgcgtaatagctcactggtcgagtgaccctgcgccgaaaatttaacggggctaaatgatacaccgaagcttgggatgacgcaagtcatggtaggagagcgttctgtaaggggagaagtcgtagcgaaagcggcggtggactttacagaagtgagaatgccggaatgagtagcgagaaatatgtgagaatcatattggccgaaagtctaaggtttttggaggaaggttcgtccgctccaagtaagtcgggagctaaggcgaggccgaaaggcgtagtcgatgcacatacggttgatattccgtaaccgctgaaagatttaaacaaagggacaccttgaaagggcataaccccggggttggtacaccggggcgtaagggaccgaaatttaagtagggaagtatgcatggacgagggcgagaaaagctttgcgaatatctgaggcgcccgtaccgcaaaccgacacaggtggacaggaagagaattctaaggccaacgggagaaaggtagttaaggaactcggcaaattgaccccgtaacttagggaaaaggggtgctcactaaggtgagccgcagagaataggcccaggcgactgtttagcaaaaacacaggtctctgccaaatcgaaagatgaagtataggggctgacacctgcccggtgccggaaggttaagaggaggagtgcaagctctgaattgaagccccggtaaacggcggccgtaactataacggtcctaaggtagcgaaattccttgtcgggtaagttccgacccgcacgaatggtgtaacgatctgggcactgtctcaactacctgcccggcgaaattgtagtaccggtgaagatgccggttacctgcgacaagacggaaagaccccatggagctttactgcagcttgatattgggtttcggtaatctatgtacaggataggcgggagactaggaaaccagtgcgccagcattggtggagtcaacgttgggataccgctcttaggttgctggaattctaacctgcggccatgaatctggtcgggggacattgtcaggcgggcagtttgactggggcggtcgcctccgaaagagtaacggaggcgctcaaaggtcagctcagcacggacggaaaccgtgcatcagagtgtaaacgcgtaagctggcctaactgcgagggtgacggcccgagcagtaacgaaagttggagttagtgatccggcggtatgtgaatggaaatgccgtcgctcaacggataaaagctaccctggggataacaggctgatctcccccaagagtccacatcgacggggaggtttggcacctcgatgtcggctcatcacatcctggggctgtattcggtcccaagggttcggctgttcgccgattaaagtggtacgcgagctgggttcagaacgtcgtgagacagttcggtccctatctgtcgtgggcgcaggatatttgaggagcgctgtccttagtacgagaggaccgggatggacgcaccgctggtgcaccagttgtcacgccagtggcacagctgggcagctatgtgcggaacggataaacgctgaaagcatctaagcgtgaagccggctccaagattagatatcccatcgagtaaatcgagtaagaccccttgaagactacgaggtagataggctgtgtgtgtaagcgtcgtgaggcgttgagcttggcagtactaataggtcgagggcttgaccatagagttatacttgggaaagcgcgttagtgatttacatcaaccacatcccttctttacatctccttctctccctttctttattcggtttttagggcgcagcccagaaatgcaccattagctcagttggtagagcacctgactcttaatcagggtgtcccgggttcgagcccctgatggtgcaccaaagtggtacatgaggaatgtaccagaaaaggggctaagggacggaaagagccttagccccagcggtatatggctcgttggtcaagcggttaagactccggcctctcacgccggcaacgcgggttcgattcccgcacgagtcaccaaagacagcaaaagaagaaaaatctataaaaagagataaatagatggaatcgaacccgagagggtttcagcgtaaagaaaaggcgcctgaggcgcgtttttagctgaaagcggtgagcttggtaccgaaaggcggagcctttgggtaagcgaaccagaagcacgcgcagcgtgcggcgattcccgcacgagtcaccaaagacagcaaaagagagaagcagatagaaatctgcagaaaaaggacaggtgaaaacctgtaaaagttaaaaagacagaaaagaaaaagaaaaaatagaaaacgatgcatatttacgcacgaaagtgtgataaatataggtagtgtgggtgagaagcccatacaaagagttggtgttgaaagcgctgagggtccacccgttcccatcccgaacacggaagttaagctcagtagtgccgaagatacttggctggcgacggcctgggaaaatagggagatgccaacataaataatcctcaatagctcagttggtagagcatgcggctgttaaccgcagggtcgttggttcgagtccaacttggggagccaaaaacaggagtatccatcgaagatgggtgctcctgttttttgttatgcaatttggagatggggcagtaaccctgcaaggttaacagccgcaccggctgtaaacactggcggaagcaggcgggctttgcgcaggaagaaacagagagcaatgcgaagcgctccaagcgagcagggcggcctttgtttctgaccgatttggccgttggggcgtgttggcttgggcagttaaaaacaggagcatccattgaagatgaatgctcctgttttttgttatgcaatttgaggacggggcagtaaccctgcgtggggattagccgctaccaagccccagacaggataccggctgccaaccttttttatgaagcagaacattttgtctgaatataccttgttaccagggaacatccggattcacccggcttgttaaatatggctcataatgctttttgctgcagcttatccggtatgtattgtaaattccggagctgacccattcttcatcataatggtcacaccaaacctgaaagaggccatattctccataacatctccataatgccatggtttggtgattgcaatccgaacattcgcggttatgtgtccaccaaaccggagaggaagcgtccgggattttttcgggaatctgttcttttgctaacaagcccataatttgcttatattcctcttctgtcaaaacttctttcaatatctgggcaggacaacaatccttcccattcttaagagcgacacccccggctttaatcaatttgtttttaatgctgtcggagaaaggataatctgcttttggcatgagatatacatttccatctggtacagcgtgttcgccgaagcaagtgaacagttcctgatactcttcgtcggacaagacgttttttgtaacgctttttagattaattggctttgtcgaaccctcgtattctttcctgatttttctcagcttttccattgttttttcgcttaattgtttcataaccgtctccttgtttttttggcataagcagggtaaataatcaacgctgcgatatgcttttattccaaaaacatcggttttatattaaaataaattaatcaataaaaaatcgataactcttggtaaaaaaattatattatattttttaatagttataaatctttttatgaataattacttgtacttatttactgtctatagtagattgaaaattacaaattttacttgcgcctcagttattccgatatcatatcaaagaaagttcggacatacacatttattatcatgtgggaggtgccgaacaatgaaattcaaaaaatttttatgtacattcttatgcgccgcgctgctgttttgtattccaattcctgcatctgcgctgggagaagaagaaattaccgccccatctgcggtgcttatggaggctcagacgggaaaggtgctctttgaaaagagcagccatgacgtgcgcgcctgtgcttccgttacaaaggttatgacgctgctgctcgtttttgaggcaatcgatgctgggaaaatcaagatgacggacgtcgtcacggcgagcgcgcatgcggcttctatgggcgggtcggatatttggcttgaagaaggcgagacgatgacagtagatgagatgattaaggcgacagtcgtagcttctgcaaacgacgccgcggtcgcgcttgcggagcttgtcgccggcactgaagatgagtttgttgcgcaaatgaatgcacgggccaaagccctgggtatgaaagaaacagtttttaaaaattgcaacgggctcgatgaagacggtcatgtgacaagcgcgtatgatgttgcgctcatgtcacgggaattaatcaagcacaaggatatcttcaactatacgtctatctggatggattatctaagaggcggagcaacccagattgtcaatacgaacaagctgcttaaaacctataaaggaattaccggcctcaaaacggggacgacgagcaaagccggcagttgtatttccgctacagccacgcgcgataagctctcgctgatttcggtcgtgcttggcagcgcaagcggcaaggagcgctttacagacgccgcgaagctgctcgactatggctttgcgaactttacaagcattgtcccaaaactcgagcaggagttaactccggttaaggtgaaagatggtatgtttaaggaggttgcgacaaaaacagacctcagcggcagctttttaattaaaaaaggaaatgaaaaaaatatcaagagcaaaatcgaatatgaagaagaagtacaggcgccggtcaagtcggggcaaaaggtaggcaaaatcacctatacactcgacaaggagaagcttgccgaatacgatattaccgcacagaatgatgtagaagaggtcactttcctgtcgattttgactttaatgttccagagctttatcaaaatataatgtgaccagtccgtaaattatttagaaaaaaggccagtcccgccttgcaaaaaggcgggaaatattgtagaatatgagcatagcaatgataggtctgacaccttatgtgacctatccgtacaaggaggaaaatcaatatggcaactacactgagtgacaagcacctgtccggcttcgtgagcgcgcaggaatttgacgggattgcttcccaaattaaggcagctcatgaagcgcttcataacgcgacgggcctaggtaacgattttatcggctggctcactctgccaacagattatgacaaggaagagtttgcgcgtattaaggcggcggctcagagaattaaaaagaatacggatatttttatcgtcatcggtatcggcgggtcttatctcggcgcgcgggctgctattgaatttttaaagtcgcccaactacaacgcaatgaagaaagatacgccggacatttattacacgggcaattctatcagctcaacggcgcttgcggagttaattgatctttgtgagggcaaagatgtttccatcaatatgatttccaaatctggcactacaacggaacccgcaatagcgtttcgtgttttccgtgagcttcttgaaaacaaatacggcaaggaaggcgcgaaagagcgtattttctgcacaaccgataaggaaaaggggacgcttaagcagcttgcggacagggaaggctatgaaacctttgtcgttccggataatgtcggcggacgctactccgtgctgacggctgtgggcctgctcccaattgccgttgccggctgtgatatcgacgccctgatggcgggagcaaaaaaggcgcaggaggcgctttccaatcccgaccttaatgcaaacgactgttataagtatgcggctatccgcaatattctttaccgcaaaggaaagagcacggaaatcctcgtcagctacgagccggcgtttactatgatgtccgaatggtataagcagctattcggcgagagcgagggcaaaaacaacaaggggctgttcccggcctccgtcgttttctcaacagacctgcactccatgggccagtatatccaggagggcaggaggaacctctttgaaacggtcgttcttttcgacaagccgaagagggagctgctgctcggtaccgacccggaaaacgtggacggcctgaacttcctgtccggcaagtctatggattatgtcaataagaaagcttttcaggggaccgtgcttgctcataacgacggaggagtaccgaacgttgttttgaatgtggagcagatgaacgaggatgagcttggctatcttatctatttctttgaaaaggcctgtgccatcagcggctatgtgctcggcgtcaatccgttcgaccagcccggcgtggagagctataaaaagaatatgttcgccctgcttggaaagccgggttatgagagcgagaaagccgcgcttgaggcaagactgtaattataatggaattttccgcgctggcggttaaatatacttaggaggcgtatcaaaatggtatctctactggttggtaaaaaaggctctggcaagacgaaaaaattgatttctttggcaaacgaggcggtggcaacttcttctggcaacgtcgttgtaattgaaaagggcgcaaagctcacctatgatgttacacataaggcaaggctgatagacacagatcaatacgcggttaccggttacgacatgctttacggatttatcagcggaatctgcgctggcaattacgacgtgacggacatccttgtcgactctacctttaaaatctgcggaaaggactttaacgcacttgatgaatttgccaaaaaattgaaggttctcgcggagaatgcggaaatcaaaataacgctgctgatttcagctgatgaaagcgagcttcccgaggatatgaatgtcggttacgaaaaaatttagtttgataccgctgtttttataaaatatgacgaagccatggggctctgctccatggctttcttatttattattactctataaaaaaaccatactttatttatttgtgaaaaaacaataaaactgttcgttttttattaaaaaacacggcggtttattgcaattttcacctaaagctgttataatatattcaattgattgccagttgtatccattgcggtgcggctgcggttaaaattatcggttcggttctttattttgcatgaattaaaggccggaaaaaggaggattttgtatgaaaagagcggtcaaacgctcagtaagcatcgtgctctccgtgctgatgatactgagtatgtgtgttatgggtgtattcaccggcacagccgcaacaacggacgaggacgcttccggcgtaagcttcgacggaacctcaaagatttatttggattccagcggctgcaactggtggaacaacgcgagtgcgtttatgggcatccagtttaaaaacgcgcagggcgttacgacagaccggattattatgacggctgttgagggccaggaaaagttttttgagacaaccgttaggtcagtttacaaggaactacacgcagaccgagaaacgggggctgctgacaacaaataaaggctgaatatcaagcaccggggaagtgcgagatattcagcctgttttgttgtctggggtttccaaaggggcttgccccttggcacacgactttgcgtagcaaagtgtagtgtgttatacgctctgtcggcgttgccgtgaaaatgccgttgccgccggagagggcaagggcatttgaaacggcaggaaaacaggactgtgattgcgtggcgtggagccgcaagcgcaggactggtttcatcagcagacagggcgtatatgaaagcccccgtccctcgtcctacgccgaactatgggacaaaatgtcccgaacttgtggccacacttacgaaaaagcagacggatttttctctcaaaattgaaatgggcgggaagccattttaaggctttcccgccttgattgcccattagcaaagacgggcggggctgtcaacggcggcgcatgaaatgcgccgttcatcttgaccgttgactggctcggctggctttgctatctcctcgataaatttatagttttaaatcattcaaatagtgttttaactttcaaatcaaggtctattgctttcgtataattttctttagcatttaattcagattccaagaataatattactatcttatttttagttggtttgcataatattgcttttgtttttccttgcgaaaaaatttgaggcattaattgaccttcacaaaactcattcaatgtggctacacttccatattctatcagttgcttgaataaatcatttgaactgcattttgttactccataatgtaactgaaatatattttcaactgtatctcctacagcaaaaatagaaatagcattttctattaaaaatccatttattttttctttcatttgaaggattcctctccaagcctaaattccgatttgtcgctctcttactttctcccccgctgtggggttggatttttcagcaagtccgacttctgtgcaatcttcttcagccacttcttttcttcttcggacagcttcttcaaattcaatttgagccgcttgcagatgaacgccaaagctgcttgttcagggtcgctgtctggattagcggcttcgtcaacggtctgcaagaaatctttcagcgggttatcctccgggacgctgaaaaaatcgtccttatgtgcttcccgtaggtcaagagctatcttgtttatgtcctgctgtatcacatagcggcaaaagctgtcatcatcaatgtgggcggcaataagctgccgtaactgcgggtcggtcaagccgggattgtgctgtttcataatccttgcgatcactgcgtccacgatggcgtttgcgccctgtacctgctttgtggctacgccgttcacatagatttcaaggtcggccatgagccggggaaaatccgggtgcgttgccagctcgcacaagaggggattatctaacagcccgcttttcaatagttcaatcatatcatcactcaaacgcaggtctgcaagatcggcgtttgggtgattttttgtttgagaacgccccagcagataatcaacagtcacttcataaaactttgccaactcaataagggcataatggctgatgtccttgaaattatctccttcataactgcccaacgcagacttggagaggtgcgtctgctccgcaagctgttccagcgtcagcccacgctccacacgcaggtctttcaatcgttcttgtatggatagttccatgcgctccctcctcccatgcttaagaaactctgtatgtatttataaatttccctcaactacgatgatagatgaatatttgagtgcttcttttaaccattcaagaaagcctgtcaaaaaaattctttctccatccaaaacaccgtttaagtctttttctatttcgaaaataatttttatccaatcatttttccctatccaattatcaaaacagacactaaattcctgctcaagtgttccatcaaatgcatccttaataggatatattttgttgaaataatcaactaaaatctcataatcctgctgataaatccttaaaggatttctataacaatgccattcttcccacgcagggttccaatcaggcgtatcagagatttttagcggattgaattctaataatattttttcggcttttggtgcattcaatctcaattccacatattcttgtctttcataactatttaaatttaaccatgccatatttttcagttcacctctatcatttcctatttcttgttccgttttttctattctaccataattccgagagcgtggaaatagagagtttttggtgctgatttccgaccttatggatatacggggcgggcggtcttttaggtgtagacttagggtagttcatcgatgaactgcaccttgaaaaatgaatgaccgtccgaaaaggaataccccggcaggggaagcactgcaacgagccacttcgggacaaaatgtcccgaagtccggggagcgtgccaacgccggaacacgccgcaggaatggggcaggaagccttttcggggagaacggctaaggaaaaatggagggaacacatgagagagaacccatataaacgactgccgcccatagagcgcaggcaggacggttccctttaccgcatgacaccggcacagaggaaacaggcaaacgccctgatctgccgggagtgctgctgttatgaggacgggaactgtatgctccttgacgatggggacacccacacctgtccccagaccatttctttctcggtctgctgcaagtggttccgctggtcggtcttaccgcaaatcggaacgctggaagcagagattttccgggataaggacttgaaacgctgtgcggtctgcggcagagtgttcgtcccaaagtccaaccgggcgaaatactgtcccggctgtgccgccagagttcacaggcggcagaaaacagaaagtgaacggaaaaggaggtcttgtgtggacagttaggggctgaaaagtccttgatttacaaggctttgcaagcacagaacaggggccggcaatagaaactaccgtctgcccccggaaacagtcttctaaccgtccacaaaacacgatatgacaaacaccatttatatccatcagccggaaaaggcggtcagctttacccggcttcccaatttcctttttgaagcccctacattcacgcccctgtccaacgaagcaaaggtactgtatgcctttatcctgcgccggacggagttatcccggaagaacggctgggcggacgagtacgggcggattttcctgtattacccaatctgcgaggctgttgccctgcttcactgtgggcggcaaaaggcggtgaacaccctgcgggaactgcaatatgccggattggtggagatccagaagcagggctgtggaaaacccaaccgcatttacccaaaatcctacgaagcggttccaaacaccgacttcaagaaatccggttatggaacgccggagaactgaaaaccgcactccacaagtacgataatcaatcctcttgaagtacgaaaaccggacggtatatagaaatacagagattaaaacgattttatttatatcttatccattcctatcctatccgagatattttctgcgggattttcctgtggaaaagtcccggaaaggaatggaatggggaaaggagtttcatggcacaacacgcaattttgcgatttgaaaagcacaagggcaatccggcaagaccgctggaagcccatcacgaacggcaaaaggaacagtacgccagcaatcccgacattgacaccagccggagcaagtacaatttccacatcgtcaagccagagggacgatattaccacttcattcaaaaccgcattgaacaggctggctgccgtacccgtaaggacagcacccggtttgtggatacgctgattaccgccagcccggagtttttcaagaagaagtccacaaaggagatacaggaatttttccagagggcggctgatttcttaatcgggcgggtagggaaagaaaatatcgtgtcggcggtggtacacatggacgagaaaacgccccatctgcatttggtctttgtccctctgacggaggacaaccgtctgtgcgctaaagaaatcatcggcaaccgggcgaacttgacaaaatggcaggacgattttcacgcctatatggtggagaaatatcctgacttggagcgtggggagagtgccagcaagacaggcaggaagcatatccccacccgtctgttcaagcaggcggtcaatctctccaaacaggcaagagccattgaagccacactggacggtattaccccgttcaacgctggaaagaagaaagaggaagccctctccctgctgaaaaagtggtttccgcagatggagaacttctccgggcagctcaaaaaatacaaggtcacgataaacgaccttttggcggaaaatgaacagttggaagccagagccaaagccagcgaaaaaggcaagatgaaagatacgatggaacgggcaaagctggaaagcgagctgaaagacattcagcggctggtagaccgtatcccgccggaggtgctggcagaactgaaacggcaacagcggcacacaagggaacggtgatcaatgacagaaaacatttcacgccgcagcatggcggcactgcactttgaaaattaaatatggaggtactatggagcatatcagatacaagaaagaaaccgaagtcgtggcttttcagggaaaggaaatcacgctggaaaatctctccccggtattcacgccggagcaggaagcggcaaaacgccgggagctggaacagcagctttatgaggtgttccgcaaatatgccgacaaacggcagagtgaggaagccggggcataagattttccgaagccatcgttgatttgcggggctgctgacggtataataaaggtgtcagcagctccgtttcttttttaagaaaaggagcgacaatatgaacaatcgaatagacgcaatctatgcaagacaatcggtggacaaaaaggacagcatttccattgaaagccagattgaattttgcaaatacgagttgaaaggcggtaactgcaaggaatacacagacaaagggtacagcggcaagaacacagaccgtccgaagtttcaagaactggtgcgggacatcaagcggggcttgattgcaaaggtcgtggtttacaaactcgaccgtatcagtcgttccattctggacttcgcaaacatgatggagctgttccagcagtacaatgtagagtttgtgtcctctacggaaaagtttgatacctccaccccgatggggcgggcgatgttaaatatctgtattgtgttcgcccagcttgaacgggaaaccatacagaagcgggtaacggacgcttactactcccgcagtcagcgtggtttcaagatgggtgggaaagccccttacggcttccatacagagccgattaagttggacggtatcaacacaaagaagctggtggtaaacccagatgaagcggcaaatatccggctgatgtttgagatgtatgctcagcccacaacttcctatggggacattacccggtactttgccgaacaggggattttattcaacggtaaagaactgatacgccccacgctggcgcagatgttacgcaatcctgtctatgtgcaggcagaccttgatgtgtacgagtttttcaaaagtcaagggacagtcattgtcaatgacgctaccgattttacaggcatgaacggctgctatctgtatcaagggcgggatgtgaagcccagcaaaaagaacgacttgaaagaccaaatgctggtactggctccccatgagggcattgttccctccgacatctggctgacctgccgtaagaagctgatgaacaacatgaaaatccagtctgcccgaaaagctacccatacatggctggcgggaaaaatcaaatgcggaaactgcgggtatgcccttatgagtatcttcaatccctccggcaagcaataccttcgctgcacaaaacggctggacaataaaagctgtgccgggtgcgggaaaatcattacttcggaactggaagcggttgtttatcagcagatggtaaagaaactggcaagctacaagacgctgacaggcagaaagaaagcggcaaaggcaaacccgaaaattgcagcactgcaagtggagcttgcccatgtggatagcgagattgaaaagctggtggacagtctgacaggcgcaaacaatgtcctgctctcctatgtgaatgtgaagatagcggaactggacgggcgcaagcaggaacttctggcgaggatagcggaactgacggtggaagccattagcccggaacaggtcagccagatttccggctaccttgacacttgggagaatgtatcctttgacgacaagcggcgggtggtggatttaatgattaccaccatagccgccacaagcgacagcttgaatatcacatggaaaatctgacgggcggaacccctcccgtcagatacctaccctgtgtagtcccttgtaaactgtactttcccgcgggcgactacacgaaagctgtatttacacgttctgaaacagaaacttcggctgcgtggaattcgtttgaagtaacgattccggctgatattgcgtcgaagaacgtattccagatcaacagcggtggtaacggcggtacgtggacagactcctataccccgccctcttacgaatatggccccaagaccatttacttcgacaacaccaacacaaaatggagcaaggtctatatttacggctggagctttggcctgagcacctttgcggaaatgacattggtcgaaggcaacatttattcttacaccttcccgcaggacccggttgtgggccaggaaggctattgctttgttaatacggattcttggtctgccgccagcttcgagcagactggcaacgtcgcatctgtaaaggataaaaacttctatacgaacctcagcggcggcgcaaaggcatggaagggtacctgggatgtttatacacctgccgagcccacagagcctcctacggaagagccgacggtagaacctacggagcctccgacagagcagcctactgaaactcctacggaagaaccgacggtagagcctacagatcctccgacagagcaacctactgaaactcctacggaagaaccgacggtagagcctacggagcccccgacagagcagccgaccgaggctcccacagaggctccccatacatacacaacgttttatttctgcccgcagcaggcgtggctcgacgcgggctataccattaaggtgaacgcctgcacatcaaaggataaaaacacgtggattggcgtaaacatgactgcaacgggtgaaacagtcaacggccagccttcttatgttgctgtaatcgacaatgctgttgttccgtggggcggctttgacaaaatgcagctccaggctttggacaatggtaactggaaggcacaggttgtcgcttttgacgcatggaagacgctcggtgaaatcaatggcaaattctacagcagcagtactgcggataaagcggcttgggtcgattacacacccgatgcaaaacccgccacatatactgtgacctttactgacgaccagggcaacgtactcggcgagtcggtcgttgaagagggcggtacggcaaaaacacccgcgctcccgacgatgaaggataaggagtatgtcgctcagttctcaccggaagaccttgcaaacatcactggcgacaaaacccttacctataagctcgaggcaaagacccacacggtaacgcttgcttctcctgatgaaacagttaccatgacgggcggaacggaaggctcttttgcatacggcgaaacggtaacgcttatttgcggcgcggataatttcgcgtattggacggtaaacggcaagattgtcagctacgacaaggctttttcatatatcgtaacggccgacctggtagttgaagctgtaaaatccgaccagccggtcgtcaaggagcccgctgtttcgattgacagcccgatttttgacaccgttaccgattccagcaaaatcctcatgtatttcggcgtcaatgcaatcaatcagggcgatgccccgcgttacggcgtgttccgctttgtcggtgcagctccggctgatgcggcgaccgccattcaggattatcttgacaacggtgcgtcctccgtgtataatggaaacatcaaagagtacactgattccggcgtaatgaacagcgacggccgctataattatgtagcatcggctcctgtcggcgtttccgcagacaagacgatgacggtttacgcgtttatcgtagttgacggtgtgctgtatatcagcgatgcggtaacggtagcgccgggcgcgcagtcctgatgcaatggagggcttttaaatgaaaaaagtatttacaagacctgagatcgaggtagtaaaattcacacagctcgaggatattttggccacaaattctagcgtgccgaaggatcccgatccgattgtcgacacacctgtcgatgatattgagtggtaaatacgccacaaaccaagtgaagcagcaaggcagacagagcaatctgtctgccttgatttgtttgggaggcatttatgggaacgtaccggattgcagggctgcatgtatatatggagccgcagtttacacagattttaacaacatcagaaaaatttaaaacggacggtagctttcctgcacaaattacgattccttataagcgctgggattatgagcgctggcttagggaacggccgcatctgacgctttctgatgcggagaatatctgcacctgtaatttttttgcctctgaggtaatcaaatatgacgcaatcgtcctgcatgcgtcggcgctgctgtttcatggaaaggcttatcttttttcagcggacagcggcgttgggaaaacgacccatacgaagctgtggcagcagtatttcggaaatgaaaaagccgttattataaacgacgacaagcctgtcgtccgcctgatagacggtgctttttttgcctgcggaaccccatggtgcggcaattcgcaggaatgcgaaaatattacggctccccttggcgcaatcatttttttaaaccgtgggaaagaaaaccatattgaaaggcttttcaaaactgctcagatattacccttgctgcttatgcagacggtacatcgcacaagcgccggcaagctggacatggtgcttgcttttgcggaccagctgattcaaagcgtaccggtctacaaattggactgtacaatggatgtggaagctgttaaaatagtatcggaaaccattatatgataaatccttgagaggatgggtttttatgaaaattaaatcggactacctgctcagaaaggttgcggacagctacgtggttgttcctgtcggcaaagccaccgtggatttcaacgggatgattaatttaaatgaaaccggggcgttcctctggcagcagcttcaaaaggacgccgatgaggaaacgcttttaaaggcaatgcttatggaatacgaagtggatgaggaaactgccgaggtaggaatcgccagctttttaaacaagctcagagaggcggatttgcttgaataaacgggtctcgatgtcggacttataccccgtgctgagcgaatcgatagcgcggggcagcgatgtgagcattaccgttacagggacaagcatgcttcctctccttcataacgaaacggatacggcgcttcttacaggtgtaaagggccggctgaataaatatgatttggcgttctacaggcgcggggatggcagctttgtcctgcaccgcgtcgtcaaggttacgccaaaagggtatattatgtgcggcgacaaccaggttgtcaccgagcatggcattacagagaaaaatatcatcgctgtcgtgaagggcttcacgcgcggcggcaaaaaatacagcgtttcaaatcgaatgtacatgctttacagtgtaatttggacgaacctaaggccgctgcgccgtgggttcagaggaatcaggcgcaggatggcagagctgggaaagcgcacataaacagtggggcgaggctgctttgaaaaaaagtaggacagaaaaacaaaaatcaccgctgctctggattatcagaaattccaggccgcagctgcgtaatatcatattaattgttattttttacgctatccttgcgctcatcggggtttttaccgcgctgattgcgcgcggcgttgtggacagcgccgtcgcgggcagtatggacggcgttattttttacggctgcatgtacggcggtgttctgctgttccagctgcttttgcgcgttgtttcgcgtaatatttatttttatatcggcgcgaagcttactatgcactaccgccggaagattttcgatacgattattcggaaggaatactttcaagtatcctcctatcacagcggggagcttttaaaccggctgaccaatgatgtcggggtcgtcgctgacgctatcgtatcgattctcccgtcgctttcgtttatgataacgaagctgataggcgcgctctccgtattgatggcgattgactggcgttttaccctgatatttgtcgccggcgccgcggtgcttattgttgtatcgcagatttttagaaaaaagatgaaaaacctgcataaaaaggtacagcagaccgagggtgcggttcgttcctttatgcaggagattatttcggggctgctgatggtcaaggtgttcggcgcggaagacaaggtagacgaacgcgtgcaggagcttcagacggaaaactataaaatcaaggtcaggcgtaacctgatttcaattattgcgaacacgagcttttcctttattttttcagccggatacctttacggcctgctttggggcgcggtgaacattgtcgcgggcgctgttacgtatggtacgctgaccgcaatcctatccctgatttcccaaatacaaagccccgtagcagaaatatcgagcttcctgccccagtattacggcgccctggcgagcgcagagcggttgatggagctggaaaaaataccggacgagccggatatcaacgaaaacaacatcgataccgccgcgctgtatgaaaatctccagtctattgaatttgataatatatcttttaaatacaaccgcgatgttgtcttgaaaaatacgagcctttccatccaaaaaggagattttgccgttattatgggaatttcgggcattggaaagagcacgcttaccaagctcttgatgggcgtttatccggtgaatacaggaagcatttacctggtacggaaagacggggcgcacattcccgtggacaaaaacatccgcgggctatacgcatatgtaccgcaggggaatttccttctttcgggaaccataaaagaaaatatttcttttgtctgccccgacgcaagcgatgaggatatcatgcgtgcggctcaaatcagctgcgcggatgattttatcagggagcttcccgacggactcaatacggtcattggggaacgcgggcagggcttgtccgagggacaggtgcagcgtatcgcgatagcgcgggcaatcctgacggacgcgccggtattgattctggatgaagcgacctccgcgcttgatgaagaaacagaaaaacgccttttacagaacatcaaggggctgaaccataaaacgtgcatcatcgtttcacacaaaaaggctgctgaatccgtgtgcaacaggcatctgcggattgcgggcggcaagattgccgagtcggagatgaaataatgtcaagcgatacttccaatatgctttacaaacattaccgctatttactggagcttgtgaaggctgcggtcaatgaaacagcggcgataaaaccgcctttggatgtcagttgggggaaaatctaccaactcgcttctgaaacgatgttttcctgtcctgtattttatgcggtatccaccctgccgccaaacaccgttccacgttccatatatgaaaaactctttgtcgattttcaaaaaagcgtttcacaggatgcggaaagagttaaatttttaaatttgatgaccgacttctgtgaagaagaaaaaatcgatattatgctgctgaaaggaagctgcctgcgcgaattttacccgcaggcggaaatgcgttatatgattgacgccgatattctgattcatgactgtgactcggaaaaaatcgatgcgtttcttatcaggcgcggattcatcctgcgttcgccgggggagatacatgatgaatacgtttgtaagcgtaccgggattattgtagaaatacataaaaaactgattcccgacagcaaaagaaacgcgccctttttcagcggcgtttgggaacgcgctgttctaaggaaaggccgcagaaatacctaccggatgagcgatgtggatttttttgcatatctgtcggagcactgcgtccatcattttttccacggcggaattacagcgcggatgattctcgacttttatatccttgggcaaaaaatttccggacgcgtagacagggaatgcctgcggcgcgtgcttttggaaacggggctttttaaatttacgcagtcggcggtacatctggcgtatgattggttttcgttagacggcgcgggcctgcagagcgattcgctttcccgcttcgttatgctaaatggtaaaatgggttccctgcgtaatctggtcatcacaaacgccgcggcgcttacggacgagggcgaaacaacaactttcagatatgttctgagacgcctgttcccctcaaagaaggtgttgtcagaaaattttccaatactgaataaaaaaccggcgctggtgccgtttatgctctttgcgtggtggttgagtaagatgaaatcgaacttgtttgtaaaaggcaaaaagtttaaaacgattccttatgtaaaatcactcaaccaggaacagcgccaggttgaaagtgccaggcgaatgattgaagagctggaaatcgacccagacatgtagctgtaaaaggaggagacatgcagcaaacgaatgattttttttgcgaaatggaatatttgcttcgtttggttggctctgcggtgaacggcaaagcgcctcctgctccgccaaaggggattgattttcacgccttttgtcggattgcagaagaaaatgcgttcacacaggttgtatacccgggcgttgaggcgttccgtaaagaaaattgcttccccgccgcggccttggatgcactgaaaaagggataccagcttgcgcttgcacaggacctgaatcagcagtacgagcttgaaaagcttctcgccttttgtgaagagcgggaaatactttgtattccagtcaagggcagcgtttttaagcagctttatccgcagagcgttatgcgctatatgggagacatcgatatttgggtggaggaaaaaggatttgctcgtgtggagggttacctgaaggctgagaatttcggcctggaagataaatcaggcgtacacgacgaatatatcaaaccgccatatgttgcgctcgagcttcataaaaaacttgtatcggaggaaaacagggcggcctctttttttaatcttgacatgaccggcagggccaagccttattccggctaccggtttgttaaaatgctgacggctgaagaccagtatatttatttgattgaccatacggcgaaacacttttacggcagcggtattactccgcgcatgattcttgatttttacatgttctataaaaaattcgcggaggaaatcgattgggaggcgctgtcagaaaaactcgtgccgctccattataaaacgtttgagcgccgtctgcgcgcacttgcgcaggaatggttctccccggaaggcgcaggcgtaaggaaagatgctttttctctgtatgtgcttcaaaacgggtgctttgggcgaaacaaaaatttatatgtttcccgggcggttcgggaatcaaaggaagatgcgccgccttcaaaatttaaatacgtattacgcaggctttttcccagcttcaaaatgctcaggggcaaattcccgattctggaaaaaaggccctatcttaccccgctgatgttttttccctggtgggctacatggtttgacactttattcatcaaaaagaaattagactataagacgttaaaacatgtaaacgacatcgacagggaaagcacagacaacctgcggacgctttatgaggagatggaactcgattaccgcagatagcctgaaacaacggcttgttttccctgggaacaggagctgttatgaagggttatttccgtattaaattagtttcagtactgcttgctgcactatttacggcaggcgcgtttgcgtcgtgtggaatggcggacaagccggcgcagcatgtcataaaagaggaaagcgcgcagccgtctgaacagacggaagccggcacaacggcggaccaggcgcttgcgcagaaccggaaggaacggctgcgcggcgtactcgaccaatacatgaaaaaacagaatttcagcgggacggtcttggtaggcgtcgacaatgttatcgtttataccgcgtctgtcggctattcagaccgggagctgaaaatacataaccggatggataccgtatacgaaattggctcgcttaccaagcagtttaccgcggcggcggtaatgatgtttgtggagaagggcgagctttcagtagaagatacgctcgaaaagtttttcccggattatccatatgcgaagaaagtaaccgtagaacagcttttgaatatgacctcgggtattccggattatctaaatgaccagctttacctttgtgagacggggcaggcggacccgaaaagcaaatttacaattgatgacgttctttctattataaacggcagggagctcgaatttgaaccgggtacccagttttcctattccaactcaaattattatctccttgggaatattgtagagcagctgtccgatatgaaatatgaggactttattaaactgaaaatttttaaaccgctctctatgggctcgaccagcctggagctttcaaaagcgacggcaaagggttacctgaaggatgggcaggagggattgcgtgtggattcctcttattttggccccgccggcgaaattgtttcctgcgcggaggatatattcaaatggcagtgcgcgtttatttccggcagggtcgtcagtacggcaatggtggaaaaaatgctttcaaataagggcgcgggctacggctacggatggtttttaagggacgactattgtttccatacgggaaatacagaagcgttttatgccatcgacctcataggccaaaccgaggatataaaggttgttgccctgtcgaatgtagatgacaacgcgacttcagaaattgggcaggaaatttacaaaatgaccagggcggcgctgttcggctagccgcctgaaaggatgtatggtatgcagcggaaaacagcggcaatcattgttgctggaggggattctacccggatgggggagctctccaagcaatttataaagctgtgcgggaaagaggtaatcctccgcacggcccttgcttttcagcatacagaatgtatcgacgaaattattgtcgtgtgcagggagcaggatgatgaaaaaatgcgtgcgcttttgacggcgcggcagattccaaagctgaaaggccttgtacgcggaggcgcgaccaggcagcagtcggtacaaaacggcatttcactggtttctggtgatgccggctatattgcggttcacgacggcgcccggccgctcgtcaccgaagaactgataacgcgtacagtagagaacgcgcatcggtacggagcgagcgcgccgggcgttcctgtcaaggataccatcaaaaccgttgcctcggatggaatgataaccggtacgccgaaccgcagcagcctttacgccatccagacgccgcaggtgtttgagaaaatcctgtacctcagggcgatggaggcggcaaacacgattggcgcaggctatacggacgactgcgcgctcgtcgaggcagccgaccatccggtgtatgtgacgcagggggaatatacaaatctcaagattaccacgccggacgatattccggcggcacaagcgattatcatgcagcgcgagaaaaatggaataggagggtttcggggatgagaatcgggcatgggtatgatgttcaccggcttataaacggcagaaggctcataattggaggaattgaaattccttatgaaaaagggcttttgggccattcggatgcggatgtgctcacacatgccgtaatggacgccctgctcggcgcggctgcgctgggcgatattggaacaatgtttcccgatacggacgaagcctaccgcggcgcagacagcatagagctgctcaaagaggttacacgcgttttgcagttgaaaaactaccatatcgtcaatattgacgggacggtcattgcgcaggcgcccaagctgaagccctttgtggagcaaatgcgcaagaatatagccgccgcctgcgggataacagcggagcaggtaaacgtaaaggctacaacggaagaaaatcttggatttaccggcagcggcgaaggtatcgccgcacatgccgtttgcctgatagaataaaagaaaagattaatgtactgtgaaaggacgggtttccccgtccttttttatctcgcttttttgcccatttttatgttttttaaacaaacaggattaacgataattatttgaatatacaaatttataaaaattatttacaaaaaatataaaatatactatagttaaagtgaaaaacaatcacttggaggggattccaatgggttaccggatgtcttcatagggaaaggtgaaccgcgagaaaagaggggaaaataatgaaaaagaaaatcagtatcctgcttagtgttttgatgattcttatcttgctttgcacagcgcagcttcccgcgtcggcacttccggcggggacaaccatctatgttaacgcgtacgaggcgggctgggaaaacgcctacatatacggctggaactacggcttgcaggggaatttcatccagatggaaaaggaagactatgaaggcgtgttttcctttacgctgccacagtcctcagcggatgggtcgcagtatttttactttacaaacaaaaatacgtgggacggacaggaacagaccgtcccgcttggaactatagcggataaaaatttctatacgctatatagccgagatgaggctggaaaatggaccggcatgtggagccatatggttcctacgccgacaaacccgactcagccgcccaccgacccaaacgtaatcccggcgggaacgcaaatattatttgacaacgcgaatacacaatgggcggatgtctacctctatggctggaaatacggctttaacggggaattccgcaaaatgcaaaaaatgggagcttctaatttatatacttatacactaccgcaggatgtaactgtcggggaaaagttctgcgtgtttgtcaacaaggaaaattgggaggatgcccagcagaccgtagatatcgcatatgagactgctgataaaaatacggtatgcccaaatacaggcgcaaccccatttgaatatgcctggcgcagcaatacaccgccggttactgccccgtatgtctctgcgaccccgtcaaagagctttatgacgaacctgaatatcggcctttataccaattgctttgaatcgaagtattcaattgacggcgggccgcttatctcttatacggatggtgcgaatctccctatatccgtgacgacgtcgcttaccctgaaaggctatgaccgcctcggtattgaggtggtaagcgcttcctatacctacacaaaggtaggctatacgactattacggcgactgtgacgggctacggcggagatgtatatgcttacctgttcggaggcgaccggttgggcggcgattttcacttgatgacaaaacggtatgacggcagctatacgtactccttcagcggtgccgcgcaggttatttttaccacgacgggaaattggaatacagcgcgcaagttgaatatggacgaaccgtatatcgccgccggcagcaccgtaagctttgagctcaccgctcctccggttgaaaatatagtaccggctggcacggtcgttctgtacgacaacataagtacagaatggacggacgtttatatttacggctggaaattcggattttacggcgaaatcctgccaatgacgcaaatagcgggtacgaacctgtacttttatattttgccggaggacgtaaagctgggggaagagttctgcctgttcgtgaaccaaaactcatgggccggcgctacccagacgaagaatatagcgttttctgccgatacgatgaacacggttgtaccatccggcacgggcagcccgctcaattatacctgggcctacaatacgccgcctatggtaaactatgtttccgcaacgccttctaagtgtttcgcggaaacgcttgacgtcgttctctacaccaattgtgaagttgccgaatattccattaatggcggacgcccgattgcttacacaaacggaaccattatcacacttaccgaaacgagtacaattgttctgactggttatgacgcaactgacgagcagattgcaactggtacttacacctatacgaaggttggaatgacgacggttaccgcgaccgtaacgggctacactggcgacgtttatgcctacctgttcggcggcgaccgcattggcggcgagttttacctgatggagaaggatgcaagttctggcgtctgcagctatcagtttgaaggcgccgcgcaggttatcttcaccaccacggacgattggaccacggctgttaagctgctgcctgccgacgagccgctcttagaggcgggttcaacaacagcgttcgagctcacttacccatatccttatttataaaagcgttcagaaggaaggggctgtttcaacagtcccgctccttttgagttccacagcataaccggaaagtggattttttcttcccgccatgctatactggacgcatattattttaacaaagcaaggggaaaatgaaatgcagcgcatttggatttacgatacgccgatggggaaaatatctattgcggagaacggagaaggtattacgcggcttacatacggggacgtttttgagcccgaccgttatgaagcgggggaaacgccgctgatacgtgaggccgcgcggcagcttgccgaatattttattcaaaaacgcgagacgtttgatttcccgcttgccctcgagggaacagattttgaaaaaaaggtctggagcgccttgcttacgattccgtatggggaaacgagaagctacggcgatatcgccgcgcagataggtaacccgaaggcgtgccgcgcggtcggcagggcaaacggcgcgaaccgtatcgcaattgtcattccctgccaccgcgtaattggggcggacgggacgctgaccggatattcctccgggctcgacaaaaagaagttcctgctccgcctggagaaaatcccatataaggattaaataatcaataaagacggccgccccgggaaaagctcccgcagggcggccgtcctctatgaggggactgttattccttttcgtttatgagcagctcgcggtctgcagcaagcagcctgcgctcatcctccggcatttccgggtactgcgggtcgatttttttaagcgcctccagcaccgcttccgacaccaggtaacgcgtataccacttgttgtcggcggggatgacgtaccatgggcagttttttgttgcggtcgcgttgatggcgtcctgataggcctgctggtattcatcccagagcttgcgctctttaatatccgaggaggaaaacttccagtttttaatttttaaatcgatgcgttccagaaaacgttttttctgcgtttcttttgaaagatgcaggaacaccttgacgacccggtagctgttatcatataggtattcctcaaaatgcctgatttgcccatagcgcttttctatgatgtcctcgcccaggcagcggcgcgccatgttatagtccttatagagcttgcgtacctttacgacgagcacgtcctcgtaataggaacggttaaaaattgcgacctctccgcgcgcgggcaggcatttgaaggtgcgccacaggaaatcgtgcgacagctcgcgctgcgtcggcgccttgaacgaatagacccagacgccctgcgggttgaagccgcccattacatgcttgatggtgctgtccttgcccgcggcatccatcgcctgcaaaatgataatcagcccttcctttgcgtcggaatagagcttctcttgtaagccggcaatctgtatgaggttatcttccatctttttctggtattccgctttcttgcccttgagcgcgcccgcgcccgttggatagtcgccgagctttatttttttcccgccgtcgcagcggaaatccttaagcgccatcatattgctccttttggtgtgtttttcttttctttatcataccatttatttacagggaatcaataggattcctctaataataaaacaaattctatttgatatagcgttcccaaaactaaaacaattttgcgtatggcttgtacatttttgtaaaacagggattttttgctgttgtagaacaaagaaacagagcaggccatcttccattgattttgcttacgacaatttccacataatttttctctttctttctttgaaacagcctcccgactatcctccgggaggctgtttcgtttgttgaattcttttcaaaagcttcctttataaggcggatttttctttagggccttctgcttttaaatttatcaagaaacaagctgtttcttggatttcttgataaaactttctatgttcaatcaaaagaggagaaaccgttcatatggattctccttcttttttgaagcatactgcttcttggttttcagaaaacgtaccgtttcttggtttctttcataaaacttttatgttcaatcaaaggggagagaacagttgcggctgttcctcccctttgtaacccctcttcgagcgcttttccaagggaaccctttcgatgggttcccttacggcttacgggcggcaaagcatcgcgccgccctccgcctatccctccgcagccgattcaaggagcgtagccccttgaaaatccccctaagaggaaactgtccgttcctcattttatctctgggggtgtagaaaagatactgcgggacgtttcagtgccgcgccttcgcgcggagttctacgtggggcggtacttactaagctaaaacagcgctatttccatttactggtgaaacttcttcaagttttaagccttttgtatgaacataaattataattagtatgtacatatgaaaggagggaacttatgtcgccccgtacaggcaggccaaccgatgaccccaaaaaattccgtctgacacttcgcatttcacaggaagaaaaagaaatgcttgtctactgctgtaaagaaagcggtatgaccaaaacagatgtgattcgtaagggcatccggtcggtatatgaacagctgaacaaataaaggaacgccgtgcactcctcgaaaaagataacacagcgtcccaacctcaccagccattgcagggcaatgacggcgtaaatattatagcatgcgcgcgtcttcctttcaagcggcggtgaattttataaacatgaaaggttgtacaggttttatgaatatcatcgaagagctctattacggcaatatcaatccgattgaaaaggaattcaaacgcgattccagctatgcgaagtttatgaaaattttctcagagaatgaacataagctttttgctttttttgaagagcacaaggaagaaaaagaattatttaccgcaatgtgcaacgcgcgcaacgccctgctcgactttggggaacgcgaacgctttatcgagggcttccggctcggcgcgcgttttttgctcgatatgctcattacggaacgtcccgccgcggttcaggacattacataatggcaagacccctgtttttaaaaaacgctgcaaaaggagaacaaaatgaaagatgaagatttaaacgcgctgttcaagctgctggaacagcatatttgtccagaggcggggagcaaaaggaaacaggaagagcaaagggaagaaccgccatatcaaaatgaatatccctttacttttcatgacaggtttcttgaatacataggctttgccgccagcagcttttcaatttttctggaattcaatccatttgcgagtaagaaggaagcagattttcttttcagccagtttgttttatcgtgtattgcgcggtgtgccggagacacgcatgctgatgaaattgccggcagcggatattgttatataacggacgcgctgaaatactgctgttcttcccctgatgcttgagccggacaaagaataccgccaccctgccttttcacaataacatagtaagagtattacgcacgccaaaaaagcactatccaacgtagaactccgcgcgcaggcgcggcgcagaaacgtcccgtactatcttttctacatccagcgcataaaacgaggaacggacagcttcctcttagggggattttcaaggggctttgctccttgaatcggctgtggagggataggcggagggcggcgcgatgctttgccgcccgtaagccgtaagggaacccatcgaaagggttcccttgtaccgacgaaaagggtttacaaaagggaaaaacagcggattgtttttcccttttgattgaacatagaaagttttatcaagaaatccaaaaagcagactgcgtcaaaaaaataagaaataggacgtttaaaaaacgataaggaaagagaaaccaatacacctggtttctctatttttattgcgcctgtaaggaataaatatgaaaaaccgctattggaaaccgacaaaaacagttgcgcctctttgtaagactttaacaaagaatcgctcttgcttgtaagcatttaagcaaaaacggcctgcttggctttaaaaagcaggccgtttggtacaattttgaccgaattcgccgtaaatattttttaattgcgcaaattagtaccaataggaaaaaccaggctgtttttcccacgcaaaccagtacaagttcaaagaaagattcttctaacaatccttgttgcacacatgctaaaatataaccgtcagataaacgagtatttgtgcagatggtcgcctgtctcacaaagaaaaaacaagccaaacattgaatgaaaggatctgtcattatgaaagcaaacaaaatcattgccattattatggcggcgcttctagcggcaatcacattcgcatcgtgcagcggcgggggagatacctcttcggcaggcgccagcggcggttcatccgcaggctcctccggaggagcccagaagattaccatctgggcttgggacgaaacctttaacatcaaggcggcagaggtcgcaaaagaaatgtaccagaaggataaccccggcgcggaaatcgaaatcgtcaccatggcgcaggacgacatcgtccagaagctccacacgagcttatcctccggccagacgtccggccttcccagcatcgtgctgattgaagactacaaagcgcagaatttcctcagcgcataccccgacgcgtttgaagacttgaccgatatcgtagacgagagcgcgtttatggattataaatttgccgtgaacaaaattgacgacaaaatctatggcgtcccgttcgattccggcgtagcgggcctgttctaccgcaccgattacgtcgagcaggcgggctacaagcaggaagatatgcaggaccttacctgggaaaaatacattgaaatcggcaaggctgtgaaagaaaagaccggccacgcgatgctgacgctcgacccgtccgacatcggccaaatccgtattatgatgcagtcagcaggcagctggtatgtaaaagaagacggccagacggtcgatattaaggacaatcaggcgctcaaggacggtatcaccgtttataaggcaatgctcgacgcgggtatcgtagagcaggtttccgactgggattcctttgtttccgcgttccagagcggcaaggtcgcttctgtaccgacaggctgctggattggcagctccgtcatcaaggcggaagaccagagcggcaaatgggccatcgccccgattccgcgcctcggcgaaaataaagattccgtcaactactcctccatcggcggcagcggctggtacgtcatcaagggcgtcggcgacgcaagcgctaacaaggattttctgagcaaaacctttgcgacgagcaaagagcttgcaaaccagcttgctaaggacatcaatctcgtcagcacactgaaggctgcgaaggatacagaaaattacgaagcaaagaacgatttcttcggcgggcagcagatattcaagaatttctctgaatggtctgagaaggttcccgctgtcaactacggcctgcacacctacgcggtcgaggatatcatgaccgaggccgttcagtccatcgtcggcggcgccgacatgcaggaaacgctcgatgccgcgcaaacccaggcggaaggcgcagttatcagctaaccgctacatccccacctctttgagccggccgccgcgggaaaagcagcggccggctccctcagagaagaccgctaaaataataaggagggattcgtttggatgcgatgtcaagcggcgtaccaaagggtacggcgaaaacaaaaaaagcaaataccagacggcagcggcgcagaaataatatcggtatgacccgcaaggaaaatctcgtcggctgggcctttgtcgcactgagcaccgtgctgattgtcgtgctggtatttatcccgatggtacaggcaatcatcacgtccacacagtcgggactgggcaacaacctgaagtttgtaggctttgacaactacctgcgcctgtttggtgataaaacgtttgtcaaggcggcatggaacactgtgctgtatctgctgatacaggtaccgattatgattatcttcgcgctgattatttccgtcatgctaaatgacagaaaactgaaattaaagggcgcgttccggacggctatcttccttccgtgcatcacctcgctggtagcctattccatcatcatgaaaagcctctttgctccggacggcgtcgtcaaccaggcgcttttgggaatgaacatgattgcggagccaatccagtggctgacggacccgttttgggcgaagatactcatcatcatatccatcacctggcgctggacgggctacaatatgatattctacctgtctggactgcaaaacatagacccgtctatttatgaggcggcggatatcgacggctgctccgctgtgcgtaaattctttaaaattacactcccgctgttaaagccgattatcctctttaccaccatcacctctaccatcggcacgctgcagctgttcgacgaggtcgtgaatatcacgcagggcgggccggcaaacgcgacaattacgctttcccagtacatctacaacttaagctttaaatattcgccgaacttcggctatgcgtcggcagtttccatcgtcatactggttgccatcatcatcctttcggcaatccagatgaaggtcggaggtgacaaacgtgaagcgtaaattcagtattgcgagggttttcaaatatatcgtgctgaccgtcatatcgctcgtctcgattttcccgtttatttttatgctgttcggtatgacgagcaataccaccgatatcatacagggaaaaatgcagattggcggggagcttgtcaagaactttacaaacctcttcagcaacaacctgaacttccttcaggcgctcggcaattcggcagtcatcgccgtcattacgacggtactggcgcttcttatttcctcggcggcgggctacggctttgaaatcttccgcaccaaatcgagggaccgcctgtttaacttccttcttctctccatgatggttccgtttgctgcgctgatgattccgctgttccgtatgttttcaaatttaaacggaacgccgttcgggctagatacgatgttcgtcgttatcgttccggcggtatccaccgccttcctgattttcttcttccggcagaatacaaaatccttcccgaaggaaatgattgaggcggcgcgaatcgatggggtaggagagctcggtatcttctttaaaatctttatgcccaccattaaaaatacgtttgcggcggcggccattatcacgtttatgaactcctggaacaactatatgtggcccttaatcgccctgcaaacacccgataaacgtacgattccgctgattttgtccgcaatgggcgcctcctacacgcccgactacggcatgattatgtgcgcaatcgtcatcgcaaccctgccgaccgcgcttatcttcttcattatgcagaagcatttcgtacagggtatgattggctcggtcaaaggataaacaaacataaccggacgcggtgcgggacggatgaaacgaatcagctggttcaaatccgtcccgcttttttaaggagaaatgcttatgaataacaaaccaaactttgggtggctttcagaccccgcggtgttcgccgtcaaccggaagcccgcgcattctgaccaccggttttatgaaacgcgctcacaggctgaggcaatggcggaaatgccgctttccttttctttgaacggcgcctggcactttgcttatgcgcgcaatacaggggaaataccgcagggcttttgggaaaaggggtatgatgtatcggattgggacaatatcctggtcccgtcgcatatccagcttgcgggctatgataaatgccagtatatcaacaccatgtacccatgggacggccacagcgagctgcgcccgccgcaggtggacgaaagctataatccatgcggatgttatgtccgcagcttcgttttgccggagcacctcaaaaacaagcggcttacgatttcgttccagggcgtggaaacggccttttacctctggtgcaacgggcagcttgccggctacagcgaggacagctttacccccgcggaatttgatttagatgaatttattgaggcgggcgaaaacaggctcgcggttctcgtatgcaaacgcagtacgggcagctggctggaggaccaggacatgtggcgtttttccggtattttccgcgacgtatatttatacgcgcggccgcaggtgcacctgtacgacctgtttgttcaggcgagcttgaatgaaacgctcgacaaagcggaaattacattgcaaatgcaaataataaacgcgcagggcgcgcaggcggaaatcgagctgtttgcgccggatgggacaaaggtatatgcgtctttgggcataccgctttccgaaagcagcacccatacgttcgcggtagaaaaccccgccctttggagcgccgaacagcccaacctctacaaactgtttattactatacagaaggacggggaaatgatagaggcagtaccggagaaaatcggtgtgcgccgttttgagatgaaggacggcgtcatgtgcttaaacggcaagcgcatcgtattccatggcgttaaccggcacgagttcgactgccgcaccggcagatgcgtttcctacgaagatatggtatgggacgcaaaattcatgaagcgcaataacatcaacgccgtgcgcaccagccattacccgaaccagacgcagtggtaccgcctgtgcgacgaatacggaatctacctgatagacgaaactaacttggaaagccacggctcctggcagaagatggggcaggtaaagcccgactgggttgttccgggcgaccgggaggaatggctcggtattgtgctcgaccgggcaaaatcgatgctggagcgtgataaaaaccatccaagtatccttatttggtcgtgcgggaacgaatcgttcggcggcaaagacatctatgaaatggcacaatatttcaggcggcgcgacccgtccaggctcgtccactacgaaggcattttccatgacaggcgctatcccgaaacgagtgatatggaaagccgtatgtacgcaaggcccgaagaaatagaggaatacctgaaatcgaacccggaaaagccctttatttcctgtgaatatatgcacgcgatgggcaattcgcttggaaatatggatgaatatattgctttagaggagaattatccacaataccagggcgggttcatttgggactatatcgaccaggcggtcgtaaagcagacggaaaacggtgaaacgcttgcctacggcggcgacttcggcgaccgcccgaccgattacaatttctgtacggacggcgttgtgtacgccggccgctcgccttccccaaaagtgcaggagatgaaatacctttaccaggatattgtgcttgttcccgacgagtacggcgttcttatccgcaataaaaatctgtttgcagatacaagctgcggtacgttttattggacgcttctgctggatggggaagcgtcgcagagaaattcctttgcgtgtaccgttatgccgcagcaggagcggtacgtcccgcttcctgttgaagtaaaaggcggggaagcagcgttgtccgtttcattttgcctgaacagagatacaaaatgggcggaaaaggggcatgagcttgcgtttgggcaggctgttataaaatgcggcagccggcaggcgaaagaaaaagtacctgccggagaaaccagaattgtccggggggacatcaacacaggcgtacacggtaaggatttttctgtgctgctttcaaggcaggaaaaggggattgtttccctccgttatgacggcagggagcttatcacccgtccgccgaagccggagtactggcgcgcgtccaccgacaacgaccgcggctgcgggttcgattataagtccgcatgctggatgtttgcctcgcgcacgcagctttgtacggacatcagggaagaggagcgggacggatgcgtcgccttcacctatacctaccgcccgcttgcgtggagcgaatgcgaagcggttgtgtcttatacggtgcaaaaggatgggagcatcgatgtgtcggcctgctttgcaggcgcggaaaacctgccggatttgcctttgtttggccttgtgctgcgcctgccgaaggaatttgaaaacgtattatattatggcctcggcccggaagaaaactatatcgaccgcagccgcggggcaaggcttggaaaatttaagtttaccgcgccggagaacctttcgcggtatgttgtcccgcaggaatgcggcaaccgcactggtgtacgcttcgctgaggttacggatgccgacggcttcggcctgcggtttgaagcaaatggaacgccgtttgagcttcaggtgcttccttatacggcgcaggagcttgaaaacgcgcttcatccacaggagctgccgcccgcggcgtatacgaatatacgcatcgcggcaaagcagatgggcgtcggcggggacgacagctggggcgcgccggtacatgaggattaccatcttcctgcaaaccgccggtacgcgttttcgtttaccataagaaaatgcggaggagaggggtaacctcttcctccgcaggcaatataatcgattcgttgtttaaccgatgaagtcccgggcgggaatcgtaattttcacgatggtaccttccccgggattggaggagatatggacgccgtagccttccccgtacaaaaggttgatgcggtcgtttacgttacgcacgccaatgccggtaaaaggatgtcctttctgcgcgtcccttgaccagagccggtcgagctgctccctgctcatgccgacgccgttatccattatctcacagatgagccggccgccgctgcggcggacaaaaacattgattcgcccctcagccctgctggaaaaggcatggaagaacgcgttttccacaaacggctgcagcagcattttgggaatttcaagcgtttcgcagccctctgcgatggagtaagcgatgtttaccttatctccgtaacgcgcctgctgaatcagggcgtagtttttcaggttgtcgatttcctgctggacggcgaccatctcgccctcattgctgatggtgttgcgcaggagattgataaacgcgtcgattgtctgagtggatttttccgtgctgccctgccatattaaaaacttgatgcacgcaagcgtattgtacatgaaatgcgggttaatctgcatttggagcgcgtggatttcagcaagccttttttcttcctgcagggtgacaagccggcttacgtaatcgttgaggccgtcgagcatatgattaaaggcttccgcaagctcgcgcgcctcgccgcctcccttgacctcgatatgccgtgagaaatcaccgccgacaatctcaggcatcctgcgcgcaaggtttgtaatcggccgtgtgcttttgcgcacggtgaaaaacaatataagcatcacaagggcgatgatgacggcgcatacgagcagcgtatcctgcgggcggtacatctggttaagcagggcggtttcattgatgacgcttgtcagacggaaaccatatgaagtaagctcctttgcaagcacggtcgtttccaggccgtcttccgacttttgctgccggtacagctccggcccgtttatgatatcctccgcgagcaggttgagctctttcatgtgtttcccgttttcagaaattgcgttggaggaaataaccatcccgtcttcgtccgtcagcacatagacacggttaatagtcccgtcaacaagcggacggtacagggagctgaaatcgctctgcgtaagcagcgcgaccgccgcgccgtaaggccggttttccgcacggtcccaaagggatttcgctgccaaaatacagctttggcctttggtggcggtcgtaaagccgtcgggcgtgtaggcgtaaagaaccaggtttggctgtttcattgcctcgcgcacagcgctggtttccaaaatttcctgcgcggtttttgtcaggcgcgcgtcgccccttacaaacgtttcgccgttcgtaccggcgagaatcaggtgaatcgtcacctgcgcctgcacggacgcggcgctttcaatttggcttcgcatctggtggcgcaggctgtactgttcgtctacgttcatttcagagccggatataatgcgggataccgcatagctgccggaacaggtagtaagcagggagacgatatcctcgtttaagcgcgcatattccgactgtacctgcgtaatgaccttgttgttggcctgcgcgtaggtatcgatataaattttttccgacatttggataacaaaaaaagaaatcagcacaccgacaatcaggattgcggcagtcgtaatcgtgacaatctttagaaacaggctgttgcgcctcatccagccggaaaatgcggttttcttttccatcttagccctgtcccttcctatattcgcttggcgtgcggccggtaaacttcttaaataccttgcaaaaatagctgtggtcggagtagcctaccattgcgctgatttcggaaatcggaaccgatttgttgcgcagtagctcaagcgatttttcaatgcgtatccggttgaggtattcgctgaagccctcgtcggaatgcgcgctgaaataagaggaaagatagtaatagctgaaattgaattttttagcgatgtcgtttaaagtaagcggttcgctgtaatggtcctgtaaatacgcggtaatccgtttcatcgtatcgttgttgatttttaaatggtaattttggataatgacggaaaaatccccgcagatatcgtgaaaaacctttaaaaaatcttccgcgtaagcggctgcttcaatgctgctcaggtaattgagcttcaggtggcttaaattctccgcatttaaattaagctcctccagctcggagataaggttatacagcatactttccagaaacgccttgagctccggctcattcatgcggtattccgtgactgcgcggtcaacgtattcgcgcagcatttgcagcgcttcttcaaaattcattgaggttaattggcttgtaaaccgtttggtatcgaacttttcgtattcctgcagcggcgggaattttgaggccgccatcagcggcacatccttgtaataaaagcgccgctcggtcagcttgcagaaacggtcgttataaacagtacggatatcgtcgagcttataaaacgggtcgcttaatacaaagaacaatccggaggaagcggcggaaagcttttctactgtttctttgaccgcgtgggaaagcgtagcctcgtcgggatggtcgtaattgaagatagccagggcgatatcatcattgatgttgattggatacggatggtatgtgcccagcatttcgtaaacgccgctgcccataaatccgttgataacgctgttgtttttacagattttacggttgattccgagaatgcgcagacagggtaaagggaactgttttttgagttgttcggtttgcagaacgtcggtaaagcctaaaataaactggttgattaggctttcgatatgaatatcggcgttgcttttgagcgcaaggttcgggatacgctgaaccgccttctgcaggacggaaagcagctcctttggattgagcgtcggttttaaaatataatccacagcgccgctttggaaggtgcttttgacgtattcaaaatcgctgtagccggacagcacgattacctgaatcccgctgtttttgatattcagcatttttgtaagctctatgccgtccatgacgggcataacgatatccgtcagtacgatatctggcgggtccttctcaatcatctccagcgcctgcttgccgttgtcggcttccccaacaacttgaaagccgtgcttttcccagtcgagaagatgcttgatgccctgccggattatatattcgtcgtcgacgattaggattttacaaaactgttgcatagaaatcaccctttccaaatgaacctgagcgatacgcgatgttcaatatatttcattataacacgtatttcataaaaaaaacagatcatataaagaattttggttgcatttttgccggatacaaggaggatttatcatggaaagcaaatctttacaagcgttaaaagtgaaattcggggagctattcccggaacagggggagccagccgtttattttgcgccgggcagggtcaacttgattggtgagcataccgattataacggaggccatgtgtttccctgcgcgctcgatatcggcacgtttgccgctgtcaaaaaacgcagtgaccgtacgctccggcttttttccatgaatatggagcagcgcggcgtgattgaggcgccgctcgacggccttcattttgatgaggaatatgactgggcaaattatgtgttcggcgttatcaaggtttttactgataagggataccgtgccgactgcggcctggatatcgtgttttatgggaacatcccgaacgcttcggggctatcctcctcagcctccctggaggtgctcaccggctatttgctcaaggagcagttcggctttgacagcgtcaatatgattgagcttgcgctgattgggcaggaagcggaaaataagtttatcggcgtcagctgcggcattatggaccagttcgcggttgcaatgggcaggaaaggctgtgccgtatgcctcgatacctccacgcttgactatacctatgctccgcttcatcttgacggcgttaggatagtaattatcaacacaaataaaaagagagggctgaacgattccaagtataacgaacggtgtaatgaatgcgcgcatgcggtcgaggcgcttaaaaaatatgagttcctgaaaaatctctgcgagctgacgcccgaaaagtttgaagagggaaagaaattcattacggaaccaacggtaagaaaacgcgcgcgccatgccgtttacgaaaaccagcggaccatcgatgccgtaaaagcgctcaaaagcggagacctggggcggtttggcgagctgatggtacagtcccatgagtcgctgcgcgacgattatgaggtaacgggagtagagctggatacggtagtggaagcggcgctcagacaaaaaggcgtaatcggcgcgcggatgaccggcgccggttttggcgggtgcgcggtcgcgcttgtaaaagagcaggatgttgcggcgtttgagcagaacgttgcaaaagaatatcaggaaaaaacagggctgcgcgccgacttctatgtggtggaggcgggcggcggcccctgcaggctgtaataatccattctgtaatctcaaccgaaggggcgcatgaataatgattgattccgcgataaaaaagctggtaagatatgggctggaaaccggattaattgaagaaagcgacaaaatttatgctacgaaccgcctgctcgagcttctggaaaaggaggaatacggggacgacgggaaagaataccgggatattctgctggagcagacgctcaaagagctgctcgactatgcctgtgagcacggtatgatagaaaacagtgttacggcacgcgacctgtttgatacaaaattgatggcggtactgacgccgaggccgtcggaggttgtcaaggtatttcataaaaaatatcaggaaagcccgcgggcggcaaccgaatatttttttaaattaagctgcgacagcgactatatcaggcggtaccgcatcaaaaaggatatgcgctggaaaaccgatactccgtacgggccgcttgatattactatcaacctctctaaaccggaaaaagacccaaaagcgattgccgccgcaaaaaacacgccgcagggcagttaccccaaatgcctgttatgcccggaaaacgagggatacgcgggaaatctcacaaagcccgcgcgccagaaccaccggataatcccaattgagcttggaggagaaaaatggggctttcagtattctccttacgtctattacaacgagcactgcattgtatttaactgcgaacatacgccaatgaaaatcgataagtcagcttttcaaaagctgtttgattttgtaaaacagtttccccattactttatcggttcgaacgcggatttgcccattgtcggcggctctatcctgtcgcatgagcatttccagggaggtcactatgaattcccgatggcaaaagcgccggtagagcaggcgttttcctttgaaggatttgaacaggtcaaggccggaatcgtcaaatggccgatgtcggttatccggctgggctgcccggatgagaaaccgcttatagagctgggcggcaaaatcttagagagatggcgcggctattcggataaggacgcctttatttatgcacatacggacggtgaagcacacaatacgattacgccgattgccagaaaacgcgggaacgcctatgaacttgatttagtccttcgaaacaatatcacgacagaggaatttccgctgggagtataccatccgcatcaggagctgcaccatatcaaaaaagaaaacatcggcctgattgaggtcatgggactcgcggtacttcccgcacggctcaaaacagagcttgatttgctcgcggagtgcctggctgcgggaagggacgccgggtcggacgaacgcatcgccaaacatgccgcttgggcgcaggaaatcaaaaaacggtaccctgaacgaaatgagcaaaatatccatgagattatcaggcgggaaacaggcggggtattcctccacgtgcttgaagacgccggtgtttacaaggatacgccggacggacggaaagcgtttaacaggttcctccgtagcatttgaacaaaattatataacccattttgtgtaaaataaacgtaacgcaaaatgggttatttttttatttgatatttttaaatgatatgatataataaaaaataactataagtagaaggaggggcccttttgaaaattgcgctttgtgacgatgagaagccatttcttttatggtttaagaaaaaattggaaaaacatgtgccggcggttcaggcagatgaatttataattgacctttacagcgatggcagaagtctgttaaaagcgcaggcaaagcaaaaatacaatgtgattttcctcgacatacatatgcccggcatcgacggaatggctgtcgcgcggcagctttggcagcaaagcggggaaccaattatcatttttacgtcggaaaaggaagagctcgtattccaggcgctgcgcgtccatccttttgagttcctgaaaaaaagcgaaattgaccgggagcttcccaggcttttgcgcgacatattgtgtgagctgcgcagaaacggagaaatgcttacgcttaaatgccgccagggtatggtatctatacccgtgcaggacgtctattatctggaaagcagaagaaacgacattgccgtttataccaaagaaaaggaatatatcatacgggacagcctgtcggcaaaagagaaagaacttaccccgtttggatttattcgcacgcattctggatttcttgtaaattgctttcatatatttatggcggacaaaatgcttgtgattttagatgacggaagaagggttccggtcagccgaaaccggtataaaacagtgaaagaaaaattattaaaaaatataactaaattgtaaactgaaatattgatttttgggttttcagccgacaaaatataccaaacatcacagatttgataccaaacataccaaaggtgtttattttttaggattttcgcgttatatttttagtaccatcaattaacgggttggagcgcggaattgccttcaatctcaattatttcagcatacacgcacagcgtcctgcatgacttgctgcatgcaggacgcgcaactttctccagaaaataaaaggtacgcttgtttttttcaatgaaaaaataattatgcggtgcaaagaaacatgccggattattttggcagatatttattaagagcagaataactgctcttctttttttccgtgaggattggcatatcaattgtggaggatttaagaatggaaaaggaactggagaggctagcggaggattattttattcacagggtactcaatagttatggatttgaaagcgcgcagcttgaagtgctcatggcttatgaccgcacggcaggacagcttgtacataaatatggggcgctgtaccagacggaaattatgatgaacccgcccatgcgttcgtcattttattatccatcgagaattttgatagcaagcagatgtgaaaaagaagcgtttgcaatttcgcttgcaaaaaatgttttgtctgtcaggggaagtattatggaggaaacggagcttggcgcagtgtcaagcggctccccggctgttgtgcatgccgggccgcgcgcagttgaaaaccgctatcaggtgatgtttgcaacctttggaaagctgcgggataatattgtatccttcgcgcttgcaaaccgcattccgtttttatcgtttgcgggccgttcggcggttacctgtatacatgaatttgtaagggtgctgttttccaagctgaagatgcaaaacgaagcgtatacgatactgctggactttttaaaatccgcaatttcgctgaaagagctaagggagcggctgctttcgctgcggctggccgaggagcttggagaaatagaaaaatttattcaccgtacggattttatcgcttcaaatgtacaggttgagttttttgaaaaagaaaaggtcgtctatctaatctggttttaaaacaaaaaactgccctacacgtcttttgcatattgttgacgcgaaggaaaccgtgttataataacctcacgccgcaaagcggaagccttgcaaaagcaagccttccggcggctgggagaacattgaagcatattcgtatatatacgaaggggtgttattatgtcaaacgcctttgaaacgttggcgcaatgccttgccgaggtaagaaagcggacggattttgttcctgagattgcgattgcgctcggatcaggcctgggttcgtttgccggccggatgaaggcggtctcatcggtatcctacaaggaactggatggatttcccgtatcaacggtccagggccatgagggaaggtttgttttcgcctggatttccggtgttcccgcagtgctcatgcaggggagggtacactattacgagggctactcgatggaacagactgtcatgcccatccgtttgatgggattattaggcgcaaggacgctgcttctgacaaacgcggcaggagggatcgggccggatttatccccgggagatttgatgatgattaccggacatatcgcatcctttatgccatccccgctgcgaggggaaaatataggcgagctcggcccgcgctttcctgatatgagcgccgtatatgatattggtttgcagaaggcgataaaacggacggctgacaaattggatattccgttaaaaaagggcgtgtacctgcaggtgccgggcccccaatatgaaacgccggaggaaatcaggatgtaccggcttttcggtgcggacgcggttggtatgagcaccgcggcggaggcaatggccgcgcgccatatgggtatgcgcgtgtgtgggattagctgcgttaccaacatggccgccggaatcagcggctctccgctctcccatgaagaagtacaggaaacagcaaataaggtgtccgcccgcttttcaaggctgattaccggactggcgcctgtgcttacagagggggcgggcgtatgattgacctgcatctccatctcgacggctcacttacggcaaaagacattttggagctggcttcaaaacagaaaatcccgctgccggcagacagtgagcaggcgcttgaaaagctgcttatggccccgcaaagcggcggcagcctaaacgattatttaaaacgatttgaattgcccctgcttgttttgcagacggaagcggcgcttcgtgacggtatataccggctggccggccggctttcagggcaggggatatgctatgcggaaatacggtttgccccgcagcttcatttacgcgggggcttaacgatggggcaggtatgcgaggcggcctgtgaagggcttaagcacgcgtttagggactttccttttattaaggtgcgtctgatactttgctgcatgcgcggcggagaaatagaaaacaaccgaaaaaccgtagagcttgcggcccgtttgcgtggcaggggagtctgcgccgtggaccttgccggggcggaggccttgtacgagactgaagattacgccgggattttttcgtatgcgcggcagctccgtgtcccctttacaatacacgcgggggaagccgcaggccccgaaagcgtcaaagcggctatccgtttaggagccgcgcgcatcgggcatggtgtgcgcgcggcagaagacgattcccttgttttactgcttgttcaaaataaaatcccgcttgaatgctgcccgacgagcaacgtgcagaccggcgctgtccaggaatacggttcacatcccgtattgaaattactgggacgcggcgtgccggttacggtcaatacggacaacatgacggtgtcggatacgacaatcaaaaaagagcttgcgcttttacagcagtatttgggaatgacgcgggcgcaggaaaaacaaatgcttttaaacagcgtggaggccgctttcctcccagaggaggaaaagcaggggctttacgacaaggtcctttgtaaattctctgaaatatgatataaaaaacgcgcaggcaagcttgcctgtgcgtttttgttttgtattatcagaaaaaatccttctttttaaagtaccagatgcataccagcaggataatcaggctgatgacaattatcatcgggtagccaaactgccaggtaagctccggcatatttttaaaattcatcccataccagccggtgatgaccgtaagcgggagaaatatggcggtaatgccggtcaggagcttcataatacggttctgcttaacatcgatttgtgtttggtaaagctccgtaatctgaatagaatattcgcgcagcatctgcgtgtacccataaagaaggttgattttctcagaaaggtacccaaaataagacgggttttcaaaatagccgccgtcgttgttttttaatttaacagcaacatccagcagctgcgcatagtagttgtgcaggagcatcagctcttttttgagcggtacaattttatggtgaaaatcgtcaagcctgttttccagtacgttttcctcgagcaccccgaagcgtttttccgtatcctccaaataaatcaggtcgctgtccacgacgctttccagaaattcataaaggaaccgcccgggcgtcattttcctgcgggagcgagcaagcgtaaacctgtttaaaacagtttgtgcgtgctcattacagagcaaaagtatcaatccgtccttacacactgctagaataagctttgcgcggtggcgtatgctgtcctttttaaccggaatgttcagtgtacaaagcaggtgtccgtcaagctccaataaccgtgtcaggcggacggagcgctctgtttcaatcagccggaagggaacgcccgcttcttcgcagagtggctgcgcccgctcaaagccagcaaccgccaggcagaatccagactttgcgcgtgcaaacacatccgtctggctgacgttctccccgtctatcaggtaaaaatgatttggctcaaactgtgccatgctgccgcctcttctccaaagccttagcttttttcaaaacgctctacattgacgacaaaaaccgtcgtaccgcctacgtctactgttacgggcataacgttaaagctgtccatcggtacgccgtcgcccatataagacatactgtaggccacctgcttgcgtttgccgcactggcctttgatgatagaaatcacctcatcgaccttgccgtcttccgttacggtcattaaagtggaatttccgcggcgcaggaagccgcccgtggtagagagccttgtaacgctgaagccctttttgttgagctcctcggttacacggtcgccgtcttctgaatgtacgatagcataaatcattttcatggtttcattctcctttttgtcatagctttttgtccgttttttattctgacaccattataatatatttttgattaagccgccataaaaattttgttttttgccgcaaaaaggcggtaaatacagaaaacggcgccagtattagaaaaatatatttttagaaataaagagcaaataaaagataacgacagaaaatcaaagaaaatgaatggatttatcaaaaaaaactaaaaaaatcaagtttgactttctttgaccttgcgcatataataatcacataaagtcaaagaaagtcaaagtcaaatgataatgaatgtttaggaagggggcgatgcacatgcgtatgagcgatattgtagcgcagtacatttctgaaattttggagcagtccggcggcaacgcggaaatccagcgcaatgaactggcgcagacgcttgggtgcgtgccgagccaaatcaattatgttataacctcgcgctttacgccggagcagggctatcttgtggaaagccgtaggggcggaggcggttatattcgtattacgagggtgcagctggacgccgataccgcgctgatgcatatcgtaaattctattggagatacgcttgattatacgacggcgcgtatgatgctccagaatatggcgcagcaggggctgctttcagaagcggcggcggccctgatgcacagcgcgctgaccgagcaggcatacgccggcgttcccaaggagtaccgcggtatcctgcgggctggtgtttttaaaaatatgctgctcacacaaatttgacaaattacaaacacgtaaacagatagaataacagttgggaggaatttttatgttgtgtcaatcctgtcagaaaaatcaggcgaccactcacatcaagaccattattaacggagagctgaccgaatatatgctctgcccggaatgcgccaaaaaaatgggctacggcaatatttttgaggatatggcattcgatttcagcagctttctcgggaactttttagggaacggcctcccgccgagaacaagcgcgacacgctgcaagggctgcggggccgcgtttgcggatattgcaaaaaccggcaaggttggctgcgcacagtgctacgagacgtttttcgacgacctgctgccgtccatcagaaggatacacgggaacacgcgccatacgggaaagctcgccggaagcgccggcaaggagctgcgcgtggtaaacgagcttgagcaggcgcggcaggagctgcatgacgcgattgaaaagcaggagtttgaaaaggccgcaaagctcagggacagaatcaaagaactggaaggaggcgcctctcatgagtaaaaaatggtaccagaaaagcggcgccgagggcgacgtgattataagcaccagggtacgtcttgcgagaaatttgcaggggtatccgttcccctgcaggcttgacgccgcggggcgcgagcagattgccggcaaggttagggacgcgatgttccacagcaacagtgtaatcgcggacagctttcaatatttagatatggcgaaattgagcgaggaggaggccgtttcccttgtggaacggcaccttgtaagccccgattttgtctccgaccgtcagggcaggtatctgctcctgaccggggatgagagcatcagcattatgctcaatgaagaggaccatattcgtattcaggtaatgaacgaggggatgaacctcgacggcgcgtacgagattgctgataagctcgataccctgctcgacaacgccctgggatttgcgttcaacgacaaattgggttacctgacacaatgccccacgaacctcggtaccggcatgcgcgcgtccgtcatgctgcatctgcccgcattacaacacagcaaagcgatagggcgcatcgctggcaacctttcaaagctggggcttacgctgcgcggaacatacggtgagggcaccgagccgcagggcgcgctttaccagctttcaaaccaggtcacgcttggcctctccgaaaaggcggcgctcgataacctgaagaatatcgcgatgcagcttgtctcacaggagcgcacggcccgccaggcgcttacaaacagcatggaaacgctcgatgttatcagccgttccatgggtatcctgaaaagcgcgcggcttttgagcggcgacgaatgcatgaagctgctgtcgaatatccggctcggaatcgcggcgggtgaaataaaggatattggttatgatacaatcaacgagctgatgacggaaattcagccggcgactatcatgaaaactgccggaaaacgcctgacgccggaagaacgcgaccaggcgcgcgccaataccgtaagggagcgcctttgcggataaagctggcatggaaagatgaaaaaaggaaagaaactgttttaaaaagaaatcacgaaatgggaggtatgtatgatgtacagctttaacggatttacacaaaaggcaaacagggcgctgaatctcgccgtggaagcggcgcaggacctcggccatacttatatcgggacggagcatatcctgctcgggctgcttgaggagggtacgggcgttgcaagcgccgcgctttccggaagcggaattgcagccgacgccattgaagacctgataaaaacgaaaatcggcgtaggaagccgcactgcgctgtcacccgcggactttacgccgcgctcaaagcgcattttacagaacgcggttatcgtggcggcgaagcttggccataattacgtaggtaccgagcatttgcttttggcgctgcttgaggaacaggacagctacgcgcttggatttatgcaggaactcggcgtaaaaccgaacgacctgctccagtccctgcgcgacgagctttccggcggcggtacggacgattcggaaatttttgattttgaaagcgccgctgccggcgccccgtcccagcataagggcgggaaaagcagcacgaaaacgctcgaccagtttggcatcgatctgaccgcaaaggcaaaaaagggcgagattgacccggtaatcggcagagacaaggaaatccagagagtcatccaaatcttgtccagaaggacgaaaaacaacccctgcctgattggcgagccgggcgtcggaaaaactgccgtcgcggaagggcttgccctcaagatagcgtccgacgaggtgccagagccgcttaaggacaagcgtattgtatcgcttgatttgaccggtatgattgccggcacaaaataccgcggcgattttgaggaccgcatcaaaaacgcaatggacgaggtcaaggccgccggcaacgtcatcctttttatcgacgagctgcacaccatcatcggcgcgggctcggcggagggttcggcggacgccgccaatatattgaagccgtcgcttgcaaggggcgatttccaggtaattggcgcgacgacaatcaacgagtaccgcaagtatatcgaaaaggacgcggcgcttgagcgcaggttccagccggttaccgtgggtgagccgacccaggaggaaacggtcgaaatcctcaagggccttcgcgaccgctacgaagcgcaccacaaggtgaaaattaccgacgaggcaataagcgcggccgttacgctttccgcgcggtatattacagaccgctatttgccggacaaggcaatcgatttaattgacgaatccgcttcccgcgtgcgcctcaatgcccatacggagccggaggacattaaagaaaccgagaaaaagattaaggagctggagcaggaaaaagccgccgcggtcaacgctcaggattttgagcgtgcggcaaagcttcgcgacgaggaaaagaaaacgcgtgaagagctcaaggagcagaaggaaaaatggcatgaggacaacgaaaaggtcagcggcgaggtgacagagcgggacatcgcgaaaatcgtttcagactggacaggtgtgcctgtttccaacctaacggaggaagagagtgcccggctgcttaaaatggaggaaattctccacagccgcgtcataggacaggacgaagccgtcacaagcgtcgcgagagctatccggcgcggcagggtagggttaaaggacccgaaacggccggtcggctcgttcatcttcctgggccccacaggcgtaggcaagacggagctgtgcaaagcgcttgcacaggcgatgttcggcgatgaaaacgcaatgatccggctcgatatgtctgagtatatggagaagcacaacgtctcgaagcttatcggttcgcctccgggttacgtcggctacgacgagggcgggcagcttaccgaaaaagtacggcgccatccttattccgtcgtactgttcgatgaaatagaaaaagcgcacccagatgtgttcaacatgctgctccaggtcttggaggacggcaggctgaccgattcgcagggcaggctcgtcgatttcaggaatgcgattattatcatgacctcgaatgttggagcacgcctgattacgaacgagcaaggcagcctcggttttgcgtttggagaagaaggcaaaaaggatgacgcagataccaaagcactgcgtgaaaccgtgctgggtgaactgaaaaagaccttcaggccagagtttttgaaccgtgtagatgacattatcgttttcaataagctcaacgagaaagaaattattgagattgcgcgccatatgctcaaagagctttccgaccggcttggcgcaatggagattacggtagagttttctgacgcggcggtcaaggctgtttcagatgagggctacgaccccgtatatggcgcaaggcctctgcgccgcgcaattacgtctaaaatagaggacccgctttcagaaaaaatcctggaaggcgctgtcaaggcgaacgataaggtcctatgtgactataaagacggtgcgttttgttttaataagcaataaaaacgaaacaataaaaacaacgaagaaccccggttcggtatattccgaagcggggttcttgtttcatattgcggcagctcctgcggtctcagcaaaataaatttaaattttttttgaatattattaaaaaaatgcaaattatagcaaatatttaatagattttttcgtatagatgtggtaaaatcaaaatagtaaaaggaaactgtattgtttttaagactgttatttgcgatatgcttacatgctgtgcctaaataacatccgttttacgttccgttgaagcctttgtcctgccggtttccttttttgcaggaggatagggcttgcgttcgtctgtcagtccgagtatataatccacgcttgtttcataaatttttgcaagcgcaatcaacacggcggttggaagatcgttttcgcccgtttcgtatttggaatatccggtctgtgacatgtcgagcatcgctgcaagctcggtttggcttttgtcttggtcttcgcgcaaatttcgaatacgctgaaacattatgaatcacctcataatatagcatataataatttgcgtaatgaacttgctttttaatctgaaacaggttaaaatatttgtgaattttggtcacattttaaatttttaaactatacaggaaggtattccacgttttatatgccggaagaggtgatttttttggatacagagtatatgcaaaaatccagttccaacctgaaggtcctgcttgctttttttgccctcctcttttttgcgtcttcagcagcggcggtctatttggcaaccgccggtgcgcttatgcgggaggagggaatgaaagagcttttatttgtaattgtattggcgcttggttctttggcattctttattgtggcaaagattcgttcaaaaagcgaagtgacgatttaccgctcgcatatcaagggcctggcgggcgtagaagggcatccaatccgactgcagccgttcgacatcgagttcaaggatattgattttctcgacgtcaattacaggaggattatatttgaaagcggcggcgtttgctacagcgtattatgcgcttcccatttagaagcggaggagctgtatctctctattttccagttgacggaaaacgcaagggtttacggtacgtgattggctatggcgggagaggtataatagtcctcgccgcagggagcgacgtttaaaaacgagagggcctgtaaatctgccgcgcgcaaatcgagcgcgaaaatatccttttggcctccattcaatttagattggctgtcggttgtctttatgatgaccggcagctttgctgtttctttggcctttttgagtacctgtgcgccgacctctcccaggccgaggacacgcagatagggaacaggcatatccagaaaatcggaggaaatgcccaaaaatgcgtttatcatgatacggcgaatgcgcgcgtaggtgtaccgcttcgtttttacgcccataataatatcggagagtgccgtgtactgccgcaccgcgccgtatattctgttttcaagcccttcggttacatcgggaagcttctggaaatcattacgctgcatacagcgcagccggtaaagtattgcgcgctcgaggcggtttatatcggataccctgccgtttgcaatatcctcccgcacaggctctatgcagcattccggcataaaagcaaaggcgctgtcgtctttttccagtatcagcctgcggatatgggaggcgcttgcaatattgccggacgttttcccgctgtcgtgagcggcgcctgtccgcctgacggtaaaggggcggatgctggaaccgagcgtcaagagcgcgtggatgtattcaatcccgagcgtattgttcgggtggcgcagtatgctttcaagctcaggactggcatccgccgaagcttcgcagacggcgcgcgcatagcttttgccctgcgttaaattttcttttatctctttggaaaatgagccgccgtgtattaggcgttctgccgcgcaaagcttcgcggcatcgccgcattcactcccgaatgccagtgtgtctacacagcccagtgcgtccgcgaggcttgcgcccccaagggcaaatctttgtgcgctggacgacgcccatactacgggcagctccagcacgaggtcggcgccgccgagcagcgcgcattttgcccgcgtgtatttggaaaggacggcaggctccccgcgctggacgaacgaaccgctcataatggcaacgatatgcgtagccccagacaggcggagctgttcaaacaaataccggtgcccgttatggaacgggttgaattcgctgataacggcaaagaccttcataaaagcaccttttttccttgtaaaagttgtgtaacggcgcttaaaatggttgaatttgccgccgctttgtactattatatagtattgtagaagtcaaaagcaatatataggaggagagcaatgaagattttggtaatcaatgcgggaagctcctcgctgaaatatcagctttttgatatggatgacgagaaagtactcgcaaagggaaactgcgaaagaatcgggatggaaggcagcctaatcgggcataaaacgtctgacggaaggcacagggaaatgaaggctgctatgccggaccatacggcggcgttcatgcaggtgaaggacgcgctcactgattcggaggtaggcgttatcaaagatttgaatgaagtcagcgccatcggccaccgcattgtccagggcggcgcgctgttcagtaaaagcgttctggtagacgacaaggtaatcgaggggattgaaagcctgattccgctcgcgccgcttcataataaggcgcatgtgcaggcaatcagggcgtgtatcgacgtgtttggcaagcaagtgcctgaggtcgtcgtgtttgacacggcgttccactccaccatgccgagaaaggcgtatatgtaccccatcccttatgaatattatgaaaaatataaaatccgccgttatgggttccacggtacctctcaccgttatgtcagcgcgcgctgcgcggagcttatgggcgaggatatcaagaaccttaaaattatcacctgccatctcggcaacggctcttccattgcggcggtagacggcggaaaggttatcgatacaagcatgggccttaccccgctcgacggctttatgatgggaacgcgtaccggcacgctcgacccgtcggtcgttacgttccttgcggaaaaagaaaacatgtcccccgcgcagatgagcgatatgctcaacaaaaaatccggcctgctcggtatttccggagtttcgagcgacgacagggacgttacgaagggggtaatcgagggcaacgaccgctgcaagctcgcgcacgagatgctccgctacgaaatcagtaagttcatcggcagctattacgttgcgctcggcggctgtgacgccatcgtctttacggcgggactcggtgagaaccagccgcaccacagggaggcaatctgcgaaagccttgcgtgccttggcgttgaaattgacaaggacaaaaacaatgcggcggttaaaggccacgagggcttaatcagcaagccggacagcaaaatcaaggtatacgtcatcccgacgaacgaagagctggtcattgccagggatacagagcagatagtgaaagcgcatcaataaacgaaaaggccgttctgcgtaaatgcagggcggcctttaaaaaatccgggtggtttgagacagcagtacataaggaggcgttcacggtgaaaaaacattttagaaagcttttaagcgcagttttagcatctttaatattggtaaccgccctgatgccagcggcatccgcgaaaagtgcgggagatgaagcggcgggacaggcggcatacggcgccggagacgttgacggcgacgggacggtcacgacaaaggacgtcctggaaatccaaaagcaccttgcaagcgtcgtcgtgctgaatacgcagcagctttcggcggctgacgtcaccggagacgggaaggtaggcgtgagcgacgcgctgagaatccagcagtatcttgcaaagatgataggcagccttgagcctgagcggaaaataacgcgcggagaatgggcggatatgctcgtttcatcctgcgggctgccggctgcaaatacgcaggacgatgtttataccgatattaccggcagcatttattatgagtcggttcgcagcctgtacgcttgcggtgccttaccggcggatttggcagcggaattttccccggaatccgcggtgagccgtgaatttgcagcctatacaatcgcccatgcgctcggttaccagccggagggatacacgctttcctgcatagacgcggacagcgtgcgttaccagcaggaagcatacgttgtgctgagccttggtttcctttcgcttgaaaacggcagcttcctgccgaaaaaagaacttacctttgtacaggaaaaacaaattgccgagaaactcaggacatataaagcaggagaaaaaatcgaccctgaccacaaaaactcggtggagtacgcgcccggcgtacgaaaacttgataatggcgtggcagtcgaagaaagcggcacgacggttacgctttcgggcagcggggtaccggcgctcaaaagcggagacgtgtttgtcacggagcaggccgcgtataaggcggtaaacgtttcagtctccggtgggaaaacagtggtaaaaacgtcacagccgctgcttcacgaggttgccggccatatagatgtggaaacaacagcttacggtgatgtttcaaaaatagaaaaaatcgagaacactgtaatattacaggccgcgtcaaataaaaaggctgcaaaagctatcaatcccaaggacagttggacggaggatatagaacaaaaaattgaaataaaactccctaaagttgatattggcggagggcttcttttacaaatgaagggaacagttgatgttcctaaagtcaattggaaatttgagggcgacctgcaaaaggatccaattgacattgaggaactgcttttgacggttgaaagctcctccaaggttgaatatgttttggaaagcgcggacggcgccgcaaaggaaagaaagctggaaaagccgctgttccgaattcccgttccgctggggtggggatttaccgccgacctggaggttggaataaaaattacggcggaaggaaaggccacgcttacggcaaagtttgacggtgaggaaggaatccgtattgttaacaatatgccttccgtcatatatcgtcagacgggcggaatgtcagctgaaattaaagcgtctgtaaagatgggaactacggtaagtcccatcgtgagcttcttaaggcttgccgaccttgccgatatttccctgtttgtgggaccggcggcccatttaaagatggaagcctcacaggaaataaacggccgtgtcttggtttgcggagagggcgccgtatttggctttgttgaatttaccgcaggaaccaaaagccttttaaaatatttaaagctaacctataagctgacgttgtttaatgaaaaaaattcgttctggcgaatgtccagccactgggagaacggttcctttgttccaaaatgcacaaaagacgatgagccgcaggcggagccgatagcgccgataccgccagccgccgagccagtacctgcgctttcaaaggccgctatggttgctccatatgagttggattacaagatttatgacgacggcgtttccgtttacgactatgggggtacgaaaaacaacatcattattcctgactttatcgacgggcaacccgtcacacgtgttactatgcagaacaaaaatgtgctggggataacgcttcccttatattgcgccgagttgatggatacgattaacgggaccagcattgttagtattgcgtttgccgaaggaacaaaaacaattagggcagatgtcttgagtagcctagcaggacagcaggctcgcaggataataataccggatacggttgtggaaattgaagacgaagcattttcacatactgatattaatgaaattgtattgccggacagcgtgaaaataatcggcaaagatgcttttcggaactgtatataccttaaaaacgtaaggctgccccagggaattacggaaatacctgatggaatgttttttaacaccggccttgaaaaattcacggtgccgcagagcgtccaaaaaattggaagccttgcgttttctggctcgtatctcaaagaaatcagccttccgcaaggtctgcgggaaataggcgagcaggcatttctgggtaaccagctcgaggaagtgaccgtcccgtccggcgtaatgtttaacggcggcgggcagtttggcgctaataaatttctggaacgagttgtttttgaagacggagtagatacaataccggacagttgtttttacggatgcgaagcactgaaagagctgacgctgcccggcaatataaaagaaattggggattctgcttttgggggctgtctttctttagaaagagtatctttttcagaaggacttgaaaggcttggttccggcgcttttgccagctccgggctttcgaatatattactgcctgagtcactcagagaaattggtttcagcgctttttccggctgctataatctgcagtccgccagtttgcctgatgggttaacgcagcttggcgcatatgctttttccgattgtgaaaacctgcgcgatgtaaatataccaaggggaatatcaaccattccgcagtttgcctttaagggtactggtctggataggataacgattcccggtactgtcaatacaattgagagctgggcgtttgtattctgtgaaagccttcggcacctgacgattgaaaacggggtaaaaagaattgaaggcgctttttccggcacacctctcactgtggttacgatccccgaaagtgtgcaatgggttggttcaggcgctttttcttgtaaatccctcgataccgtagcattcttatccgacagtgcgctaattgaggagtatgcgtttgaaaatgcttccgagaccgttttttatggacacaaaaattcgacagcacaagcatacgcaaagcgatttggttatccgttcgtagagctggaaagctgagcggtaccaaattaacagcccctcaaaattaagcttttgccccgtgtttgctttcacggggcaaatttttgtggtgtatgaatgatttttatgctataatcatctcagtattatccatgtgggatggaagtaggagctttatgggaatcaatattaatttaggcgcgtggaacggcgtgtttgccgtgccgaacgacgtcgtggacaaatatattaggctggcgacggaaaagcagctgaaggtgcttctgtggctgctgcgcaacgcgggaagccagtacacagcggaagaaatggcacaggcgctttcggtgcatccgtccgatatcggcgattatatccaattctgggtaaacgcggggcttctctgtgaaatgccgcagggcttagcacccgcccaggggcaaagggaagaacctgggaaaccggcggctgaagaaaccgcggctgacaggcaaccacagctgcggcaggaaaaagccctcggggaaaagaaaaagccgcgcgctctttcccgcccgcagaagcctgattccgcctatgttgccaaacgtctgagcgagtgcggggagctgtccttcctgatggaagaggcgcaggtgatactgggaaaacccttgtccgggggcgacagcgccacgcttttgatgctccatgaggacgacgggctgccggtagacgtgattctgatgattttacagtacgcggcaggcgaggggaaaaccgccatgcgctatatagagcgtgtcggcgcagattgggccagtgaagatatcgattccgttgagaaggcggaggaaaagctcagggcaatcgcaggcacaaaggatgcgtggggaaaggccagcaggatatttgggctcaacagcgcgggttccccaaccaaaacgcagcttgaatgcgccgggcgatgggtcaatgagtggaagtaccaggaggacatgcttcggcttgcttacgaaacgtgcgtcgatacaaagggagagtatagcctgaaatatatcgacggtatcattaagcggtggcacagcgcgggcattatggtgccgcaggatgtggaaaacgcaaagaagccgaagaaaaaggaaccgttgcaaaagcgcgggacctcatatgatatcgatgaacttgaaagcctgagcatgtttgacgactgacaggctttgccgcatattaaagaagaacggaggcttaagttatgggctacagcagagatgtttacctggcggcggaggatgaaatgcagcgccgccgcatggacgcgctgcgcaaggcggatgaaagaagcgcgcgcttctacgaaaaatacccgcgtgctctcgagctggaacgcctgcttttgcagacgggcgtaaaggcgggcaaggctgtcgtaggcggtgcggatgtgaaggaagagcttttgaagcttaaagaggcaaatcaggcccagcagaaggagctgcgcggcatttttgagcgcgccggtgtgccggaggattatcttcagccacatttttactgcaaaaactgtgaagacaggggctatgtcgacgggaaacggtgcccctgtatggaaaacctgcttcgggaaaaggcgtttaacaagcttaaccgcctgtccccgctgtcactttcgaactttgaaaccttctctcttgaatattattcagatgaacgcagggacggcgggccttcatccagaaggcgtatgacacagatattcaactactgtaaaaagtatgcaaaaatatttaccctgcaaagcgacagccttgttttctgcggcgctacagggcttggcaaaacacatctggcgctcgctatcgcgaacgaagtaacaaatatgggctttggcgttgtttactgcagcgcgccagacgtggtccaggcgcttgaaaaagagcagttttccagaagcgcagatgataaggaagatggggtaagaaaggcgctgcttgactgcgacctcctgatactcgacgatctcggtaccgaatttatcactcagtttacgagcggagcggtttacaatgtattcaattcccgccttaccgcgggaaagccgacaatcatcagtacgaacctttcgctcaaggaaatggaaaaatattattccgaacggtttgtttcgcgcataagcggcagctgccagcggctcgattttatcgggaacgatgtacgagtgctcattaaaaaagagcggttgggcaaaaaggcgcaatagaaataaatatagtgaccggcggcggagcaaaccgcccgctgccggtaaactgagtaacgcgaaaaaaaatttatattgacttgcgatattgaaaggattataataattcttagagttttggttgctgtgcggatgtagctcacccggtagagcgtcaccttcccaaggtgaatgtagcgagttcgagtctcgtcatccgctccatatgcttttgagaggatagagttcgctctatccgttttttataggcttttcgcaaaatttattttattttgtcatattgcgtaaaagcgccggataccatctgttgggcgggttccggcgatgataaacggccggagggctatttgggggaggaaatttttttgtctgcggatttacattgtcatacaagaatatctgacggctcggtcggaatagacgagctggttgcgatagccaagcgtaagggccttcatacgattgcggtgaccgaccacgacaccttcgccggtgctacgcgtgcaaaaattattggtgagcgccatggggtggaggtcattctcggcgcggaaatttccgcatgggattataaacgcggaaggctcgtgcatatattatgttatctctgtgaacatcccgcacggctcgagggccttttaaacaaaacactcgaaaaccgccggaaggccgttacgctttcgctgcagaaaattatgcggatgtatcccattacgcccgagatggtcgcgaaacgcgctcagggcagcacaactatttataaacagcatattatgcaggcgctcgttgacgcgggctatgcggataaaatttttggcgcgctttaccagaagctctttaacagcaggatagggattgcaaggacgcaaatcgattatcctgacgtattcaaagtattggatttaattcatgaggccggtggcgttgcggtgctcgcccatcccgcggtgtatgattcctatgaactccttttagagcttgcgcagaaggggctcgacggagtggaatgcttttatccgagggcaagagaggacgacccggaagtgctccccaaaatagcgaaggaatatgatttggtaatgaccggcggaacggattttcacggggcctgttccagtactgtaaatcccttgggtacctgcctgacgccggacgaccagcttttaaagctgaaacgaagaaagcagattctgcaaaaagcaaaggcggtgtaagtaatgagaacgacataccgtacaaggggaacctgctcaaggcaaattgaaatagagcttgacgggacaaagattgtatcggttcgttttgacggtggctgtaacggcaacggaaagggaatcggggcgcttgtaaagggaatggatgccaaagatgtaatcgaacgctgtaagggcatacgctgcggtatgaaggggacgtcctgtcccgatcagctggcgcttgcccttgaagagattttaagtgaaacaagtgaagctgtaaaagaaaattaaagcgaaatttttcttgacaacggcagaacgctttgctataatataacacgctgactgaaatgcgagtgtgctggaactggcagacaggcacgtttgaggggcgtgtgtttcatgacgtacgggttcaagtcccgtcactcgcaccaagatgggttgacaaaaagatgtcagcccatttttcttttatttatgccaatttcaggctttttgcagcgaatttcataatttgatttcctgtgtttctgggtaaaatgctgttgcggacatttttttcgcagcacaaacataaaccagcataatccgaaccttttccgttaggaaaaggttcggattatttgtttgttttctttggccggccatttacttctgcaacagggaagcgcaggccaatctccaaaccacagttgccgagaaaaaagaaaacagcgatataactaagaggacggcgcaatcaatcaccataatattgccgtataattcgtgatttctcaaattaacggctgcaataccgcggtgtcattcacattatatttaaacacagattcataccaatcaaggccgctttgacacagcggccttttatttttgcttaatatttttgctgagactaaaaataaatgagcgtaataagataaataaactaagattaatcttgataatataaattttacaattcagtaataaatataatatagattatacttataaatagaagtaaaatatcgaaaaacagttgatttaaagttattttaatattataatttgtttataaaataaattatattttaaaaatataattttttaagcgaataaatttgttttagtgttttgatgacggagtcattcaaaataaaaaaagtttttcacaaaaaaggcgttgtgaaaaagacggaaagggggaagggcttgcccgaagccttaacaccattatttcaaatgaaagaggagaaggatttatgaaacagaaaaagatgttggcattttcgttggtactggccttattggcgagcttgttcgtcgtagcgcctgcgagcgctgtaacacagcaggtcagcctgctttacgcaaagccatattacgaggggatggcagtcggcgcagagggttatgttgaggtggagaacctgagcccgaataaggttgtaacgattcactactcggcagacggcgttacctggaaggatacgcaggcagaatacttcaaagccacacagggcaactacgaagcatggaaattcagaacagactctttctccgttggtatgagaggcagcgcaactgttcagtttgccatcaaatacgaagtgaacggcaacacctattgggataataacaacggcgcaaattacacggtaaaagccgggtacggcgtcagctcgcagtacgacttcggcagcacagccgttgcaatgtggtatcagtcaaatgtagtcgatgaaaaggttaacatttatgcgcagcttaagagccttgcatatgacaaggacgtccgtgtacgctattcgacagacaattgggcaacctatgaagaagtacagggaacctttaactatagcttccctgacagcgctatagagagctgggtagtgtctgttccggcaacgcaggcgtttgaatatgctatttcttataaagtgaacggtacaacctattgggataacaattttggcgctaactatacatttgacccggcagcctaaaaattgaaggattgcggttgaataaaccgcagagtaaacatatttaacagaaaacgctgggaaagcccccgtgtaagcagacgcttacgcgggggcttttaatatttttgtagtgagtttagataacaatatgctaaattgaacgtcctccgcatagaatggtatatggtggatgcgggaaagcagtgaaaattggagtaaaaaaaatattccggtaaatttgttaaaaatcgggaatggtaactataataatagtaataaaaaattataaactatagttgaggagagctgatggaaatcagtgacgcaaagcaaagaggctaacataatgccagtaagctataatcatgctcgtctggcagcaatagtcaaatttcgattattgcagctttttatttgttaatatttttagagggaatgatttatgaagaagagcttttgggaatatgacccgcaggaggtcgacgaaacagtcgaatatctggaggcatctaacgcaaagctggagaagcaggtaagactgctgaattccgagcttgaggagctgcgtctgaaaaagaaaaccacagttcatgggcgaagcgctgaagcacaggagttacaaaaaacggacagaatgatgaaatcggtattgccatcgggggggggagagatacacgcaataagtaaacaattaataaaataggtttgtattgaaagaaaggaggcgcggacggctcctatagtaaaagcgacgagatgttccgcgaggtgcttaacgcgcttgagggcgttttggacaataaggcggtctgcatttacagctttgatgaaaaattgtattcgccgcggataattgcatcctgctgaatagacaggtgaaaatattatttagaaaagcttgacttttttattgcgaagctgtatactatataagtattctaaatgtactgattaattgccgtaggttgtaaatcgactccattttgatttaccgcctgcggttttttgtttgcattatttgaataacatttattacaggaggtgcctactatgaatagaggtactgtcaaatggtttaacgagagcaaaggattcggttttatcaccaacgacgacggaggcgaagatgtattcgtgcatttttccgcaatcgttggggaaggctttaaaaacctggctgagggccagcatgtaacgttcgacacggagcaagaccccaaaaacagcagtaagcttcgcgctgtcaacgtatgcgctgcctgagcataaccagcttaacagagaggccgcccttggaaacaggggcggtttttttcgtttgtgcgtttaaatatatggattttatgaactttagatgcttttcagcgttttgttttacgaccattctgattgtttttaaaagtaattaactttttgcatttttcctactgtttttattttgaatgctatgatataatttcagtgaaaaaatttcacaagttacggtcgaaagaatggaggatacatatgcctttttcgctatcgttaaaaccaaatcagactatctcaaataaggaaatgcaagaaatatttggttgtggtaacatgggtgggatgcgaaaatctaatctcactaattcacttgttttaatatctgactacacgaaaaatctttatgaggatagatggatagaaaacactctacattatactggtatgggaaagagaggagatcaaactctttgtagtcaaaataaaactctatattattcaaacgaaaatggagtattaatatatctttttgaagtgtttgagtctaaaagatatactttccgtggaagagtatgtctttctggtgcaccttatcaagaagaacaaccagacgaaaaaggggaaaatcgaaaggtctggatgttcccgcttaagcttataaattctactgaaattgatgaacaatatattcttaagaatataaaacataaaaagagatatatacgtagattaagtgatgataagcttagggaaatggcaatacattctcaatgtatgcaaccttcgaagcgacgagtcacaacaattcggtatattagcagcgagtatatctctgaatatgtgaaacgacgcgcgcaaggtatttgcgagctttgtagaaagcctgcaccctttcatgatttagacggtagaccatatctcgaaagttatcgaattaaaaagctttcagatggtggaccagacaccataaaaaatacggccgctttatgcccgaattgtagagtgaaattacaattgctagggttacctgaggatatagagagagtcaaggcaaggatacaagaatatggggaaataaatagttttcaagaattataaaacatttgagtataaagaggaatcgttttgcgatttcctcttttttaatgaacaaaattgcatgcagtttagtccatgctttaatcctatgagcgcaggaagctgtcattaactattcataaaagcacattattttaataagatacaacggtgtaaatcaggtgagttacaaagaaaatggcataagagatttattctgaaactaatacgtttgctgccgcctaaaatatgccctcaatgcgggcgtgcctgcttgctgtttttattcgtgccgctaatttggattaaggctgtttttcgcttttatattccggataattgtggtatactaatctacaaacattattttcctatgcgctcccttccatgggagccgccttaccgtttgctataaaattttccttatgaaaggaacgtgtcaaatgaatgctgtaaacagacaggagcttgcgcccggcgtttatttcagcagcgtcgatgacggccgttttaaaacgggccgcatcagcgtgaccatgctggttccgctgaaaaaggagacggcggccagaaacgccctgctcccacaggtgctcacacgctcatgcaaaaaataccccgattttataagtctcaacaagcggcttaacagcctttatggggcgtcagtcatgggctattgccggaagttcggagaatcccaggcgctcacgctttccatcgcagggctcgacgaccggtttaccatcgacaaggaacaggtttccgcagagcttaccgggcttttatgcgcaatgctctttgagccgaagctcgaagacggcacattctgcaagcaggacgtggagcaggagcgcaggcagctgcttgacgcaatcgacgcggaatacaatgaaaaacgcgtctacgccgttaaccgctgtactgaaattatgtgcagaaacgaagcattcggtatccgccgctacggctcgcgcgaagcggtggaaaagctttccgaaagggatgtgtacagtgcttgggaggacgttcttaaaacagcacgcgtcgaagtgatgatgataggcgcttccgataaaacggctgcggccgataccttccgcagggcgtttgaaaaggtttcacgccgccctgcggaaattaaaacagaggtcgtgcgcagcgcaggggatattacgcgcgaggcagaggcgcttgatgtcgcccagtcgaagctcgtcatggcgtttcgcacgggaatcgcggagccggacgacggcgttatggcacagcgcttgatgagtgcggtgctcggaggtacgccaaattcgaagttctttgtgaacgtcagggaaaagtacagcctgtgctattactgcgcggcgcgctatgaccgcaataaaggtatccttatggtagacagcggcgtcgagacgcagaacatcgaaaaggcggaaaaagaaattttaaaccaaatccatgcgctgcaaaacggagatttatccgactttgagatggattcaaccaaattgagtatgacgaatagcttcaattctatgtccgacacggtcggagggacagaggcgtggtatatttcgcagcttctcgacaaggagcagcttacgccggaagaagcctcaaagcgcgtcatgagcgtgtcggcgcagcaggtaatcgacgctgcgcgaaagctcacgctcgataccgtttatattcttaaaccgagcggcgctggggaagaaaaggagggggccaaatgagttttaccgagataaagggcgcgcgcacgcatgacagctattttaaagcggtgcacccgacgggccttactatatatgtttacccgaaagagggctacggctcgacgtatgcgatgttcggtacgaaatacggctcggtcaaccgtaccttttccgtaaacggcggcgagaagcttaccgtacctgacggtattgcgcattatctcgagcataagctctttgaaagcgaggacggcgacgcgttcacccgctacgcgaaaacgggcgcatcggcaaacgcctacacgtcctttgacaagacgtgttacctcttttcctgtacggagaactttgaagcttctcttgaaatcctgcttgattttgtacagtcgccgtactttacggagcagacagtgcagaaggagcagggcattatcgggcaggaaatcaggatgtatgatgattcaccagaatggcgcgtcatgttcaacctcctggaggcgatgtaccacagccatcctgtgaaaatcgatattgccggaactgttgaatcgattgcacaaattacgccggaatatctttaccagtgctacgaaagcttttataacctgaacaacatggtcctttgcgttgccggaagctgtacgccggagcaggtgtataaggttgcagataagatgctcaagccctgcaaaaagcagacggttgaaaccttttttgggccggagcctgaaagcgtcgtgaaggaatacgtggagcagattttccctgtcgctgtgccgatgttccagcttggcttcaagacaaaggcgggggaggcgcgttctacaagcgacgagctagcgcttactgatatcctgctgtttgcgcttgcttcaaattcctctccaatgtacagggagctcatggaaaaggagcttattaaccagagctttaattatgagttctttgaggggccgggttatgtaagcgttttgttcagcggcgagtcgcgcgacccgaagcagacggcggaaatcatccgcggctatgtggatgaggcccgccgaaacgggttgccggaggaggacttcgaaattgctaaaaaagcaatttacggggaaacggtcggttctctcaacaacattgaatcgattgcgaacgtgcttacggaatttgcatttaccggcaaggagctgtatgcttatatcgacgcggttgcaggggcaaaaagggaggccgcctgcaagcgcctggaaagcctgctcgacagcggtaaatctgcgctgtccgtggtcaaggccgcggactgacagaaagaaattacgggcggcagggcttatgccgcgccgcccgtttaaacctccatacggaaaggaattttcattatggtttacaacgtatcgtttcctgggctggggcttcagtttgaagtgaatcccgtcgcccttcagctcggcggccttactatcaggtggtacggcgtgctgattgcgcttgggctggtgttggcgcttatctacgcaatgaacgtctgcaaacggcgttacggcgtgtcgcaggacaagcttttggactgcgtgctcgtcggaattattacagcaattatcggggcaaggctatattatgttgcctttaaatgggacgtgtacagccaggaccctatgagcatattctacataaattcgggagggctcgccatctacgggggccttatcggcgcgcttatcggcggtctgattgtggcgaaaatcgtaaaggtgaacatccccgcgctgctcgacatagcctgccttggctttttaatcgggcagggcatcggcaggtggggcaacttcatgaaccaagaggccttcggcaccccgaccggccttccctggggcatggtaagcgagaacacgggaaatatcgccgtgcatccggcttttttatatgaatccctctggtgcctgctggggtttgtgcttctgcactttttcagcaaaaggttcagaaaatacgacggacaaatcttccttctgtatatggtatggtatggctttgaacggatgattgtggaagggcttcgcactgacagcctgtacacgccgttttttaatctgcgcgtgtcacagattgtctcactcgtcattatggttgccggtatcgtattcctgattatcaaccaggtgaaaaagaaggatacaatcgccgttccgcttaaaagaaaagtgaaaggatgagaatagcttatggctaagatattagatggaaaagcagtttccgcgtcggtaaaggagcaggtggcgaatgagactgccgcgctcaaggagaaaggtattacacccgggcttgctgtcgtgattgtcggcgacgaccccgcctcgcatgtatatgtaaacaacaaaaagaaggcgtgcgcccaggttggcttccattcggaggaatacgcgctgcccgcgcagactacgcaggaggagctgctggctctcgttgaaacgctgaacaaaaagcctgacatcaacggtatcctcgttcagcttcctctgccgccgcacctcgatgaaaaggcggttatcgaggcgattgacccgaaaaaagacgtggacgcgttccacgcttcaaatgtcgggaaaatcatgataggcgattaccatttccttccctgtacgcccgcgggtgtgatggagctgttaaagtctgaaaaaatagacgtgtgctcaaagaactgcgtcgtcatcggcaggagcaatattgtcggcaagccgatggccatgcttctgctgcaccagaacggcacggttaccatctgccacagccggacaaaaaacctgaaggaggtctgctcgcaggccgacattttggtagcggcggtcgggatagcaaagtttgtcaagggcgatatggtcaaggagggcgccgtggtaattgatgttggtatggatcgggacgaaaacggcaagctctgcggcgatgtggattttgcgcaggtcgagccgaaggcctcttatattacgccggtgccgggcggggtcggaccaatgacaattgctatgctcatgaaaaacacgctgatggcggcaaggctgcaaaacggtatgtattaagcgggaaaagtgctggaactgcttgacagggctttttgcttgtgctactatattatagccgcatattacgggcatctataagagggcgtatgtccccgcccggcgaatagcgagtctgaataaaggaatggtttattacatgtacgcaattatcgaaaccggcggtaagcagtacaaggtagagagcggcgacgttatctacgtggaaaagcttacggcgcaggaaaatgacacggttgatttcaaggtcgtcgcgcttgcaacagaaaacgacatgaaggtcggcagcccgtatgtagcggacgcgaaggtaacgggcaaggtgctcaagaacggcaaaggcaagaaaattaccgttgccacatataagcccaagaagggcgaaaagagaaagatgggtcacagacagccttatacgaaggttgaaatccaggcttttgaagcgtaagccatgattgaggcggtcttttacacatcggacagcggaaggcttctgggctttcgcgtgaagggtcatgcgggctactcggagcatgggagcgatatcgtctgcgcggcggtcagttccgcttcactgatggctgctaacaccatcacggaggttctgcacatcggtgccgacgttacggtaaaggacggaaatctcgcaatcaggatttttgagcgggacgcggatatctgccgcgacatcctctcgggcttcaagctgcatatgctgtctcttgaagagcagtatccgcaatatatcagcgtaaattatacggaggtgtaaacaatgattaaaatagacattcagttgtttgctcataaaaaaggtatgggctccacaaagaacggacgtgactccgaatccaaacgtctcggcgtaaagcgtgcggacggacagttcgtgcttgccggcaacatccttgtcaagcagcgcggaacacatatccatcccggcaacaacgtcggcagaggctctgacgacactctgttcgctttggtggacggcaaggtccgttttgagcgtgtaggccgcgaccgcaagcgcgtcagcgtttatgcggagcagtaattgcgtgcaaacaataacgacttgaagggcggaagggtttccgcccttattttataagcagagggctttttatgtttcagaacgattattttatgcgccagattgaaatgctcggccgctttcttgcaaagctgatatttaataaagaaacgaccgtatacgaggtaattatcgacgaagagggaaatattacccctgctggtttactttatctggaactcaatacgatgataaaagagggtagaataaatgaagcggagaatctgctcttcgaccggattgaagcgacctatgacaatgaatacctggaaatcgccattgatttttattcccaggtaaataatttgacggatgaatttttagaggagcacgatttttcacgggaggaagccatggaagggctttccaaagtgaaacagctttacggcattgaagagctgtaacggcgcctgacggcagaaaaggcgggacaaaaaaatgtttgtagattacgcgaaaataaatataaaggcgggcgacggcggcgatgggcatgtttccttccacagagaaaagtatgttgcagcgggagggcccgacggcggtgacggaggaagaggcggcaacgttgtgttccaggcggacgacaacctttcgacgcttgccgatttccgttataaaaggaagtatgccgcgccccgcggcgaggacggcaggccgagccgcaggacaggaaaaaacggcggagaccttgtgattaaggtgccgcgcggaacggtggtaaaggaagctgaaacagggcgcatcctggcggacgtgtcttcagacgagcaggttgttgttgcgcgcggcggaaacggcggttggggcaacatccatttcgctacgccgacgcgccagattccacgctttgcaaaaccggggcttcccggcgaggagttcgaggtacagctcgagctcaagcttttggctgacgtggggcttgtgggctttccaaacgttggaaaaagcaccctcgtttctgttgtgagtgaagcaaagccggtaattgcagattaccattttacaacgattacgcctgtgctcggcgtcgtcaggatgggacaggaacagtcctttgttatggctgatattccgggactgattgaaaacgcaagcgaaggaacgggacttgggcaccagtttttgcgccacgttgaccgctgccggatgctcgtgcatatcgtcgatgtcgcgggcagcgagggccgtgacccgaaggacgactttaatattatcaaccgggagcttgaaaagtttgattccgagcttgcaaagcgcccaatgctggtcgcgggcaataagtgcgatttggcacaggatgagcagatagaggaatttaaaaggtttgttgaggagcaggggtacgagttcttcccgattatggcggcgattcgccacggggtagacccgctcctgcaaaaaatacaagagatgctttcaaagcttccgccgattgtgcgctatgaggcggagcccgcgcctgttattgagccggagaagctcagggaccgcggcgtttcggtcaaggtagtggacggtatttatgtggtagaaggtaaatggctgttgaacgtgatgcgttcggtcaattttgacgattacgaatcgcttcagtatttccagcgtgtgctgataagcgcgggcgtgatagacgctttgcgggaggctggcatttctgagggcgatacggtatcgatttatgacctggactttgattttgtggaataatgcggaggaacgtatagatggacaaattgctcgacaggcaatgcgacccgcggcagtacagcccgctggcgctggcctttataggcgacggcgtgtttgacctgatggtacgtgagcggcttgtaacacaggccaaccgaccggtcggggagctgaacagaatgaaggttcagcaggtctgctgcaaatcgcaggcggaatttgtgtctttattgctgccggagctttcggaagaggaagaggcggtataccggcgtgggcgaaacgcgcacagccgcccgccgaagaacgcaagctccgccgactaccacagcgcaacgggttttgaggcgctgtgggggtatttgtacctgcttgggagaattgaccgcctttgcgagctttttgaaaagctgatgcgcgacggcgaatcggatacataaaaaccatccagaatatgtaaactaagagcaggtatggcctgctctttttttgcggccttaaaaaacactgtccggcggcttcccgctgaacatggcagcttaaggaaggatattactgtatggtaagggaatccatcaataaaaaatcgattttcctcgatcttctgttttttctcgcggggagcgtgttgtacgccatatccgtcgatatgttcaccgcgcccaacgaaatagcgcccggcgggcttacaggcgtaggcacgatgctcaattccctgtttgggctgcccatcggcaccgttgtgctgatactgaatattccgctgtttatttggggcgcggcagtgatgggttggaaatttcttggcaagacagttaccgcgactgtgcttgtttcagcggcgattgacattttagagccgtttctccccgcgtacacaggcgataaaatgcttgcgagcattttcggagggatatttataggcgtagggctttcgttgattttcatccgcggcggcacaaccggcggaacggaccttacggcgcggcttttgaaccggcgcaggccgcagatgtccatcggcaagctgatactattaatcgatatggtagttatcgttgctgccggccttgtttatgggaatttggaaagcccgctttacgccgtcgtcagtatttttgtcacaacaaagattatcgacgcgcttatttacggcacgagcataggcacgggcaagatgatgtttattatctcggacaaaaacgaagaaattgctgacaaaattatcaataccataagccgcggcgtgacaaaaataaaatctgtcggcggctacagcggcgcgccgcgcgaggtgctattatgcgcgctcagccgcagcgaggtctataaaacgtacgacgtcattcacaaaatcgacccgcacgcgtttattattgtgggagaggcgggagaaatctctggggaaggctttgcgtcattaaaaaaagattgacagaagaatatggaattgatataataaccctgttatgtctgcgggtcagacggcgggcatagcgcggcatacaggccgcttgttatccttgctccggtcaaaagctgccggggccaaagtccaaaaggaggtgcacaaaagatggcagtaatcaattcctatgagaccgttatggtcatttctacaacgctcggcgaagagggcattcaggctatgattgaaaaattcaaggcgctcattgagaagcatgctactcttgaaaacgtcgacgagtggggcaagcgcaggcttgcatacctcatcaacgacgaggccgagggccattatgtcctgattaacttcaagagcgagcctgatttcccggcggagctcgacagacgttacaagattacagacggaattctccgttccctcatcgtaagaaaagacgcttaagtgaatatatgaagctaggaaagaaggatgaaacgtaatgaataaagtgattttaatgggcaggcttgtagccgacccggaactcaaaacgacgccgtctggcgtatcggtcaccagcttccgtattgcggtggaccgcaattacgtaaagcagggcgaagaacgccaggcggattttatcgacatcgtatgctggaggcagcgcgctgagttcgtttgcaagtattttgtaaagggccagctgattgcgcttgaaggttctatccagacacgccagtaccaggacaagaacggaaacaaccgtacggctgttgaagtagtcgccgacaacgtgtatttcacaggcgacaaaagaggcggcggcgccccgcagggcggatattcgcaggctcctgtaccgacggaagcaccggcgcccgcttatacgagcggttcgacgggcgactttgaggaaatgcctttggatgacgatttaccgttttgattgagagcgcagttttttctgcgattatttataaaggagcgatagaaaatggctgacagacccgagagagacaaccgccgcggcggacgcaagggccgcaggaaggtttgcgcgttctgtgtggacaaggttgaaacaatcgattataaggatattgcaaggcttcgccgtttcctttccgagagggcgaagattctccccaggagagtaacgggtacatgcgcgcatcatcagcgtgcgctgacgcttgcaatcaagagagcaaggcatttggctctgcttccctacacaagcgactgattttacatcgataaagcgcagcggcgggtttgtgacgaacctgccgctgtttttgtttttttgtttttaaacgccaaatcaggaaagaacgcgccctgccgtttaataaggcagggcgcgttccctttcaaaggaagaaactattagttttattctactgtaaattcagcggcgatattcaagtcctcttttgtggtatcgtttgtaatggggaggacaatcctgtaccgtccgggggagagagggctgttttcgtcggcaaccgaatagctgcgttcaccggttccccctgcaaatgcaataatttcttcactgctccagattgtatcgattgcaagcggcacgtggacccagcggctgttatgataggcctgaagctcatattgcgcgccaaatgagtacgagtcctttgtatcatttgataagacggcaattaccttctggacgtccttaggatagcttttctgctttgtttggaaggagaggttgtctattttggatatgatggcttcggtgggtgcttccgtggcggaagccgcctgtgtttcatctgcaatggagcttatgttatgctggttggagcagccgcagagggtgaaggcagctgtcataataagagccattatccatataagtcctttcatccaatcacctgcttagtatcggtttaagtaccaaaggttgataccaattatttgtactgacggcggcttccttcaattctccggttgtcttttcaaagataatcgcctcggaatcaagaatctcatttttaaagttttggattttctctgcggtcaagttgaagatgctaacagaaattgcattttggtcgtctagtaacataaaataacggatatcgtcacaaatattcggttggtgagttccccttttttggttttctaaatttgtttcaatttttgcactgattatatccatcatttgcgttaactcttcatgagaatacgctgcagattcaaaccgcacagcagaatttcctgccgcttccgtaagcgtttgcctgatttccggagtattgtcggtgagcatgacggcgagcttgccgttgccatcaatataggagcctgcgtaataatcggggtagctcgttgcgcggtttgtccgtcctgagggaacgcagcgcaggaactcatcgatattttcaccggcttcgcttgcgtcgcgctgcttgtcaaagatggcgttcaaggcggcgtcctcactttgttccggttcttgcagctgcatatgattgtacccaacagccgttacggataagatggagaaaagcactatcgccagagctaacagtccgctcaatatgattgaaaatttgtttttgcttttcttccatatcattttcatgcactccttcataaaaattgaggtaaaattattagttacgtgagttgaaatattaaaaccaccttctttatattaatattataaccttataattataaaaaataaagagtttttcgcatttgctatgttttttgtgtaatttaacataaagagtccccggcatgaaaccatgccggggacaatgcgcctgttattcttattcgtttgaggcaagcgcccggttgagccagatctcgccaatgtccattgccagataaaggccgtttttttcactcgcctttacaacctgcttcctcgggctgatatcggggtcggtgcacatcagctggaccgttaccttatccgcgacctccaggtcgttaaccgttttctttgactttatctgaagccggattacataccgttcgtccatattgccgtaatacagcacgtcgccgcagcgcacgagcggctttcctttataggtagggaacttctctttctccgccatagacaatacctccctctgcgtttttctttcagataattatagcatgaaacgccctttcagtaaagctttttttcagatggttacatttttttgttcataaataaatatttagtgattgttaacagtatttccctgacaaattctaagcggaatccagtgcttatttctcgagcggaaattcaactgattgttataatgataaaataaattaacattttatgcccgctttttcataccgtttttagacggtatctataaaggaggaccgtgtgtgttcaaaaagaaactgataacgggagccgtggcggttatgatgaccttttcactggtttgcacgcctgtcaatacatatgcgcagacgaacgaaacgctgaaagctgaggagcttgaccggcttgcttatcttggcgatgatttgggcgcggtctacagcagggaaagcacctcttttaaggtgtgggcgcctacggcgtctgaggtgaagctcaagctttacgggacgggcagcgacggtgaagacggcgcaaaggttttagaggaaacgccgatggactacagcagcggcgacggcacgtggtcaattaccgcaaagggagacctggacggcgtttattatacgtacctggttacggttgacggaaaaacaaacgaaacggccgatatttacgcgaaggccgcgggagtaaacggtgacaggagcatggtcgtcgatttgagcagaaccgacccggagggctgggatgaggataagggtgcttatcttaaaaaccagacggatgcgattatctgggaggtccatgtaaaggattacagcaatcatgcgtcctctggcgtcagcgagaaaaacaggggcaaatacctcgcgtttacggagaaaggcacgaccctgaacggagaggggaaaatccccacaggaatcgattatttaaaagagctcggcgttaactgcgtacagattaacccgttttatgattatggctcagtcgatgaagcgtcgactgacaaagaagcctttaactggggctacgaccccaagaattataatgtgccggaggggtcttattcctccgacccatttgacgggcatgttagaatcaatgaagcgaagcagatggttaaagctctgcacgatgcgggcattgccgtcataatggacgttgtatacaaccacacctttaccggagaggattcgttctttaacaaaaccgtgcccggctattactaccggtttttggaggacggctcctggtcaagcgattctggctgcggaaacgacacggcgtcggagcgtgaaatgtaccggaagtttatggtggattccgtccgttactgggcgcaggaataccatatcgacggcttccgctttgacttgatgggcctgcacgatgtggaaaccatgaatttaatccgcagcgagctggacaagctgccggacggtgagcagattatcatgtacggcgaggcctgggatatggctaaggctacgaccgccgagatggcaagccagaggaatatgccggagctgagcgaccgtatcggcgcgttcaacgacggcatccgcgacgtactcaagggcgacaacttcaatgcacagagcaaaggctttgtgcaggggaagggcgctccgacacgcatgaagcgcggcattaagggcgctatagacgattgggcgaagcagccctcgcagacggttacctacgcttcgtgccatgacaacatgacgctttatgacaagcttgttgcttcagtaaaggggacggacgccgattaccgcaagcggtacgacgacctggtagaaatgaataagctttccgcggcggttatccttacctcgcagggcagttcttttatgctggcgggggaagagatgggccgctccaaggacggcgaccacaacagctataaatccccggcgtccctcaatcaaatagactggaataatcttataaaatacggcgatttggtatcgtactacgctggtttgactgaaatacgcaggaattttgcgccgtttacatgtcccgacaaaacgtcggctgacaatatggtattctttgaggaaacagacaagcatgtggtcggctatacgctgcaaaacacagagacggcggacaagcaatgggaaagggtcgcgtgcatttttaactccgaccctgagaaagacgcagaggttacaatagaaggcaaaaacctgcccggggaatgggtggttattgctaaccaggaggaagcgggcgttttaaagctcggcgaggtttcgggcaaccgggttaccgtaccgaaaacgagcgctgtaatccttgttgataaggaaagctttgagcgcgtggggcttacagctgccggtacgctcaaggaaacactcaggaatgttaccgggcaggaaacccagccggcgacgcaggctgaaaaaacagatgaaaagcaggacagcggttttatgctgcctgtgcttattggcgcggcggtactggttgccggcgcggcagcggcggggattatcctgtaccgcaaaaaacgaaggtaattctttccggtttccggaaatgattataaaaacaattcaaggaggaattccagtgagaatcaggagagttacggcaatcgcattatctttgatgatgattgtcagcgttttctgtgttccgaccgtctttgctgcgggcaactattatgaagaatatgctgccggcctggacgagaaggcatacacaggcaacgatttgggtgcaacgtacaccccggaagccacaacctttaaggtatggtctccgtcagcaagcgatgcaaagctgatactgtacaccacaggcagcgacaaagaagagggcgctaaaaagattttgacgacagacatgacctacaatgaggaaaacggcgtatggtctgtcacggtcagcggcgacctcaagaacaattactacacctatcttataacgaacgacggtgtggcgagggaagttgttgatatctatgcgcaggctgttggcgtaaacggcaacaggggcatggtagtcgacctcaactccaccgacccggaaggctgggagaacgatacctacaagcttgttcccaaccagacggacgcgaacatctgggaaatccagattaaggacttctcctacaacaagaactccggtatcagcgaagcaaacaggggcaaataccttgctttcactgagaagggcacaaccttgaacggcgagggcaaatatgccacaggcgttgactacttaaagcagctcggcgtcaactatgtacatttgaacccgttctatgatttcggttcaattgacgaggccggaagcgacagccagttcaactggggctatgacccgaagaactacaacgcgccggaaggctctttctcttccaacccgtatgacggcaacgtcaggattaacgaagtaaagcagatggtcaaggccctgcacgacgcgggcatcggcgttattatggacgtcgtttacaaccatacgcacgagggccccggctcctggttccagcagacggtcccgaactactactaccgcttcagcggccagaacacctggtcaagcggttcaggctgcggcaacgacacagcttctgagcatgagatgttcaggaagtacatggtcgattccgttacctactgggcaaaggaataccacatcgacggcttccgtttcgacctgatgggcctgcatgatgttacgacgatgaacgccatccgcgcgtccctcgacgaaatcgacacaaggctcttgatgtacggcgagggctggtccatgtctacgacaacagactccgacgctcccgcgcttgccacacagattaacgcaggcaaaatgagcgaaagaatcggcttctttaacgaccagattagagacggcctcaagggcagcgtgtttgaggcaaagggccagggctatatccagggcgtcgcgggctcctcaggtgctgtgaaatacggcatccagggccaggtaaacggcggcgcgtggagggcaaaggctcctacgcagaatgtaaactacgcttccgcccatgacaacaacaccctttacgacaggcttgtcatgtctatgaagggcggttccgcagagcagttcagccagagatacgacgaccttgtcgcaatgaacaagctttccgcggcaatcgtttattcgtcacagggtatcccgttcgtccaggcgggtgaagaatttgcaagaaccaagttcggcgacgagaactcctaccagtcctcgcccgaaatcaatatgctcgactggtctaggattatttcctataaggaccttgtttcctactatgcgggcatgattgaaatcaggaacaactacgccccgttcagggacgccacgacagacactgtcaagacgaagatgcagtttgcaactgcgcccaacggcgtactcgcctacaccatttatgacgagtcacagccgtggaagaccgttgccgtcgcctttaacaaccaggcgacagacaagcaggtcacgctcacgagcaagggtacgcttcctgagaagtggacggttatcgcaaacgaccagacagccggcattttaagcctcggcgaggttaccggctctaccgttacggtaccggcgggcggcgctctaatccttgttgattccgaaagcttcaataccgcggctgttccttccacgaagggactcctcacggttaagcatgtggatcttacaacgggcgagaccatcagcaccacaaccatgcagggcgaaatcggcacgccttacgagacagaaaagaattacgcgcttgacgtagactacaacctggatcatattgacggccaggcgacaggcaccttcacgaaggaaccgatcgaggtaatttataactacgttccttattcccttgaggctaaggacatttccggcgacgaaaaagtttcccttgacgacgtgctgattatccagaaggaccttgcaaaggttgcttccatgacgcctgagcaggcagaaattgccgacgcgaactgcgacggcgaggtttcgattgccgacgtgctgatttaccagaagaacattgcgaagatgttcgtaccgggcgttggtacggttgaggtcaattaccttgacaccgacacaggcaagcctgttccgaagcagaacccgctcgtaactaaggcgcgcaccggcgcggcttacaaggcggaagcaaagacaatcaattactacacgcttgacgagacgaagctcccggataacgcggaaggccgctacacagacggcaagattgtagtaaactactactacaagtacaatccggcgacctacaccgtccatgtcaagctgcaggacggccagacctggacgccgtatctgcacgcgtgggacgacggcggcgaccttctcggcggcggctggcccggcggagagatgacgcgcggcgaggacggctggtttacgattgacgtaacctgcggcggctccttcaactggattatcaatgataacggccagggcgcgcagacaagcgatatggaaaactacagcagcgacatttgggtcgtgctcaacgttgccaagccgaacaagggtgcggacgacgtaaccgtatatacgagcaagccggaataacagccggatttgtaaaatataatacaatcagacttttgcaaaggcgccccggggggaaatccccccggggcgcttcgttttgtaaaagctgccgcacggaacggctcggtaaagcaagccgtccgcggcgctgcggccctcgccatatttctgcccattacgcccgcgcgtaccggtcaggcggcggcgcttcgcgcatcattcttctatttgtttaataaaaacgcggcggaaatccccatatgcgggcttttatatggaaggggaaaaatacgttccagccgcggcgggcgcgggggaagggccggaataccggctgtggcgccctgaaaaggcggtgttgtgaaagtttttcacataaactaaacaatttgcataatcacttttcgcgcttttttgctgtggtattttactataataatagaaacagccttagtaattgggcgtatatgtgaaataaattcacattatacaggcgcaattgtgtgaataaatttcacaacaaaagggaaagggataaactggggaaaaatttttttctgtttttttcgggaaaaacagcgaacattgcattttttgcactttttcgggggagaaattcgtaattttcttcttttttgaaaagcaaaaaatgcgattaccgcgtttttaaggcagtttcacgtgggaaaactggctatttaacccaaaaaatggaacaatttttattcgttttaaatagtaatcgaaaggtgtaatgaaaaaaaaaatctttttttcataattctattgatttttccgtaattatgagttatagtatagacacaggcaaatgagagtgaggtttaaacaatttttcctcctttaattttcgacattttaatatctttttaagcattaaaattaccaaacatcacagatttgctaccaaacttaccaaacccctttatttttccagttgtttgtgttatgttttagctgcagacgacgaagggtctttttcaaaaacaggcggcggtttccaaggccgcggcctcaaccagaaagcaaaatctaatcagactttaaaagtgaataaaagtgcataagcaaatgtaagctccggcaggcttacgatttgccatattccttaaaaggctttctggtgaaaaaaattcttcgttcgtttgtaataggtacaggcggccctcccttcccaaagtttgggccgccacgtaccgcctttcaattcggcatcaatgtcaggcttgggtttgatgtgtaataactcttgttccccgtatcaaaagacaagagcaagaaaacgtaagcaagtaaaaaatcaaagaaatgaatggaggtcaagttctcatgaaaaagttcagaaaagtccttagtattgtcctggcggttcttatgctcgcatcggtcgctgccttctcggcaacctcggcaagcgcggcggaaaatgtcgtcccgaagggtacggctatcatgtttgacaacacaagcacagagtggactgacgtctacatctatggttgggcattcggcttcgctggcgagttccttccgatgacccaggtagcaggcacaaacctctactactacatcctgcctgaagacgttacaatcggcagcaacttctgcctgattgtcaaccagaattcctgggccggcgctacccagacaaaggacatcgcttacactgccaccacagtgaacacgattgttccgtccggcacaggcagcccgctgaactatacttgggcttacaacgaacctcctgtagtgaactacgtatcggctacgccttccaagagctttgctgagacgctgacagtcgttctgtacagcaactgcgatagcgctacatattccatcaacggtgctgctccggttgcttacattgacggcgaccagattacgctgaacgagaccagcacagttactctggttggtaaagacgacctcggcgatatcgttgcgaatgcttcttacacctacacgaaggttggcttgacgacgattaccgcgaccgtaacaggttacacgggcgacgtttacgcgtacctcttcggcggcgaccgcatcggcgctgctttctacctgatggagaaagatacaacgacaggtgcttacagcttccagtttgaaggcgccgcgcaggttatcttcaccaccacgaacgattggggcacggctgttaagctgcagcccgcagacgagccgctcgtagaagcaggttctaccactccttttacacttacataccccaccgcataaggtatgtagggaacaaatccccgtatccagacggaacaaaaaatgaaatcttataaattttaggggaacaaatggggcggaacctgagtaatcaaggcacgggaatcggtctttatcgtgataaagccttccgcccctgagcgatattgcatcacctccggcctgacgttgatgtgaattttaaaattttattccaagcttatgtaaattgattcactcaggaggtaattgcgatgaagaccggtttccgaaaaagagcaatgagcatagtactttgtgcgactatgctcattgccgttttatgtattgcaccggccaccgccgccgcagcaacgactgacgacggcctaatctataccatagcaaacaatgaggtcaccattaccggctataatggagccggcggggatttggtgattcccgcagaaattgaaggcagccccgtaacggcattgggcaagacctgtttccgtgccagcgccaacccgggtgccgacaagcttacaagtattgttgtacccgacagtgtaaagacaatcggtactggtgccttttttggctgtgcagtgcttgaaacaattacactgccagaagtctgcagtattcctgcaacctcaagctttttcaaagactgtgcaaagctggaaaaggtcaggattccgagcggtacggctgctattggtaattccatgttcaacggctgctcagccctgacggaagtgacatttgcagaaccgactacagtaacatctgtaggggatgactcctttaagggttgcggttctttgacagaacttacaattcctaatggcgttatatcatttacccaatctttcatgaacctccctaatcttctaaaaataacgattcccgcttctgtaacggcgattccttcctattgctttgatgggcatggtgaagagtttaccatttactgttataaagattcttatgcacagaccttcgcggtggcacaggggattaagttcttcctgattgacggcggagaagaattgatttacgatgtgcttaacgttaagattgccgcggcggaaaaagcgctcggcgaagacgcggcttattataccaaggagtcccttgccgccctgaaaacagagcttgacagcgcaaagggtgtaaaggagacggcgactgaacaggctgagatagacgctgctgccgaagcgctggacgcgaaaaccaaggcgcttgtattcatggcgtttcaatacgcggtgacggacaataacgaggtaaccgtcaccggctttaatgacgacaggtcagacattggttccccctcaaaggatgtggtgattcccgaaacgattgacggcatggctgtaacagccatcggcgccggcgcgttcgagagcaaagcaatcaagacggtttcaatcccggcgggtataaagaccataggcgataacgcctttaaatcctgcgcttatcttaccggcgttaccttcgccgcggaaagcgcgcttacggcaatcggagacagcgcgttccagtcctgccaaaagcttgcggccattacgctgcccgaaaagctggagacaatcggcacgagcgcgtttttaggcgcaagagtgctcaagacaatcaccatcccggcggctgtaacggctatcggcgatggggcgtttggaagctgctttgagcttaccgacgtttttgttttgaataacgacgtcgtttacggcggcgcgaatgtgttcaatagcgacacgaaagtggttttgaacgcggcaagcgagtctacgaccgaagcctacgcaaaagataataacttgacatttatttctaccacaatcatccagtacaaatatgttctgggcgatgtggacggcaacggcgtagtcaatattgccgacgtcctgaaaatccagaactggctgagcaagaatattgagcttgaaaataaggcgcttctcgccgccgacgttgacgcaaacggtaaggttgaggttgccgacgtgctcaatattcagaagtataaggccctgatggaagtagaatacgaaattggaaaggaacaggagattaacgaggcggatattcctgaatatcccgctccggagaagcccacggcgcctcctaccgaggtaacggagccctccgatacgacaaatccctccgacgcgacggatcctactgttccggaaggccagatgacgctttatgtaagtaacgcggttaactggatttcaaaagatggatgcaagctttgggcctataacgtagatacgcaggaagctgtgccgatgacggttgacgacgacaatgcttatttctccgctatagttcccgaaacatggcagaatatagagttctacagaagtacctacgatgttgacgaaagcaccttcagtattgatctcccaattgagcagatgcccaacaaatggaccagtctcccggcaaggggcgacaacgactgcttcctggtaacggctgacagcgcgggcgaatggagactgtatgacgacctgattcacgaagtaggcgttaatacaatctattttgacaacagcgcaacccagtgggatacagtttatgtttatggttggtcttttggtttggcgaatgagtttgtagagatggaaaaggtgactgataatatatacaagtatacctttacagagaccccgaagcccggtgttaaaggttttctgtttgtagcccaggagggctggacgacagataactaccaaaccggcgacgtagccgcagaaaccggtaagaatttgtatacaaatcttacttcttccggtggaaagtggaccggcacatgggatgtatatgagccgtaaggcaatagtgtattttccaaacttaatttagcttacgcatggaaatagtaaaatccatccacatttttcttttctgaggaaggtccgcagcatgagcactgcgggcctttcctcatgcccgggaaagtgcagaaaatgatacaaaacgaaacaaagtgcaattaatgatacaacagatggtgcaaataatgatacgcgctttggtgcgaataatgatacaaccctgtttatgtaatgaggcaagtgcaataaatgatacatgctttaaaagtgcgaattttgatacagcttttcctctgagctttagaattgcaaattttgatacaaaccagaataagtgcattaaatgatacaaacgcctgccttacagtgcggaactgtgcaaataatgatacagccttgataatttgcgaaatatagaacggcttttaagtgcattaaatgatacaagtaagaatagcggcagggcgtgtatttttaataaaagtgcaatttttgatacaaacaggtaactgtctgtatgcaaaaaatgatacagcgttgcaaaaaatgggacaaggcagttcgctttgctaggggagaagctaacaatattattgaatcggtgcgaaaaatgatacggctggatataatatctgaaggtgcagaaaatgatacaatttcctaaaggtgcataaagtggtacaaaacaaatcatgccaaaatgatattgagagataaaaagtgcaaattatgatacagaataaactggcaagcgctatatgtttgcttgtatcacaaaatgcactgagatggtttaaaagggaaaggagcacggcaatactgccgcgctcccttccttttttatatttgctttgaggtaggctggttaataggctcgttaagcctttttttgaggtcgttcatatatgtttgctgtattttctttaaattgagaaataaatgcgacgcaagttcaagaattggatttttaaaccgaatattctctgtaaaaacaagctctgtcccgccgccgggcaggggctggaatattccaatccagtcgcctgtaaagctcttgttcgtcatttcaaaggcgtaacgctttaatggctctttttccgtaatgacaaagtgagtggaaaacccttccttcgtatattcggtaaattcaaccccgccttgttcaatttgaattctatcgaggtcgcttcgccaggcaaaatcttcgttattggtcacaatttcccatacaacgtgcggggcggcctgaaactgctccgttatggtagctgtccgcataaaaggtttcctccagatttttattctatctgattatacagctttgcatttaaaaaatccacactttttgaaattatgacttggcgctaaccgctttaattatgtaaaggatggggggttaaatccttttgcatcaggataacatcaaagcatctcccgcatttttctccaatcccacgcaggttcccgcataagataaatcccttctttttatggaattggatactgcgcagattttctgatgatatttttgctaacagatgcgtaatgtttcgttccagtgccgcggatgcgagcttatccagacatttactgccgattccctttccaatataatcaggcgcaatgtaatacccaatttccgcagtcgtgcggaacgccggaaacatgctgtattcgcttaaaaaacaaaaaccggaaatcttatggttttcataatcgactaccacatatgcggggtagcctttcagctgcccaaccatgcgcccataggaatcttccgtcaatactgacgaagtaaacagcatggtcgtgttgttggtgtagtggcgtaatatctccagaacgccgtcacgatgcctctcgtgcaatgcttcaaatgcaattttcataattttttcctcttgattggggctgctcaaaaacgcagcccgaaatatataacttctcccaattatgcttaccgaaagcggttcttttttataaaaaaagattgtgataattttaacatatattgctgaaaaaatctatatgtgatttatattcacataaatggtaacaaagcaaattgggcgcgaatagaatatggaagagtattctctttacttacaatgccttactttaaacaaaggagcttatgcaatgagtttattttatgagccttccatgaagatttacaaagctcagtatggcggcagtacggaaaatcagtactaccccgggggatgccctgttccgtttatgttttacaaggtagacgccgaaacaggccaaggacttgccggtgcttgttttgaactgcagagggatggtataaccattgcttccggcaggtcggatgcaagcggggcggtttgctttccgtccctgtacccggggagctatacgctctatgaggcatcccctccagaggggtatgcgccggttgaccgtacctttgaggtggttgttgataggtatgggagtatttgcgtagacgccgtgcctctacaaatgtttcgtgtggaaaacagtaaaacacctgcaataagcggacagtttacaattaataaagctgacctgcgcactggcagcctgctttcaggcgcggtttttgagcttgcctcctgtaagaacggctcatctgtgcgcggcgagacggaccgggccggaagcttgacattttcccaaattcctcctggaacctatatgcttcaagaggtaaggccgccaaagggatatatgccggatgacaaaacatatacagtagaagtccgagaagacagcagggtaatcattgacggctatccgcgtgcaaccattacaatcgaaaacgagccggttgtgttctcgattttttttagaaagctcgatgtgcaaacgcagcgaccgctggaaggggccgcgtttgagctaaagcaaaatggctccgttgttgctgtaagtgtatcggatagtgcgggacgcgtatttttcccgcatgttccagcgggaaaatacacaattcgggagcaaacgcctcctgctggatacctccacaataataaaacataccccgtggcagtttacccgaatggaagcgtaacaatcgacggcgtagcgtcgcagaaattttccgtatataataccaggcaggatacgctgcgtatttataagacagacgcccacaccggtgccccgcttgcgggtgctgtgttcgaactgctgcaaaacggaacggctgtgcagtcagtaacaactgggaacgacggcagcgcaaaattcagcgcaattgcgccgggttcttatacgcttgtcgaaacactccaaccgtcaggctatcagccgattacacaggagtataccgttgccgtttgtgaggatggcagcattagagtcgacggtgtattgacagacacgctgcaaattcaaaacaacccgctcctgtcagatgtttcatttaccaaaatagatgcgcagacgggcggcccgcttgcgggcgctgtattcgaaattttagaagaacaggcggttgttgttcaagcggtatcggacgctgagggaaaagtggattttggaaaacaaccgcaagggacatataccattcgggaggtagcgccgcccgaaggctacgcgccaattaccagtatatataccgtaattgttgacgcagagggggacgttgctatcgacggcgttccggcaaaagaattcaccgttcccaatacgcgccgtgtagcagcaggcatctttgtacgcaagctcaatatcgatgttgaaccactgtctggggcggagtttgagctgcgccaaaatggagcggtcatacaatcagcaacgacccaaacggatgggatagcgcagttcccagatgttttggcaggaaactatacgcttatcgaaacgcagccgcccgcaggctacgcccaaaacccaacagagcatacggttgccgtcgcggatgacggaatggttacaattgacggacggcagaccaatacgcttgcagtaataaacgaccctttattctatcaactgaccatccgtaaaacagacgcgcaaacgggcgctccagttgcaggcggcctgttttatctctataacagcagcggttcgattgccgccggcgcgtcgtccgacataaatgggaacatcaatttcggcagctttctcccgggaagctatacggtgcgggagcagcgcccgcccgcgggctacgaaccgattaccggttctttacaggtggaaatcgcggcggatggtacaatttcggtaaacggtgcgcccgctgaagagtttgccctagccaataccagaagcacgggccttcaagtgcgtaaggtaaatccggacgatgaaccgcttaaaggtgctgtatttgaactgcgtcaaaatgatacggcggtacaaacagaaacgtcaggagtcaatggagttgctgcgtttggctatccgcaggctggttcttataccttagcggaagttcagccgcccgagggttaccgcgccgatactgccgttcactcggtattggtagacgacgaaggcggtataaccatagacggattagaggaaaacaacttaacagtgcagaatcttccgctgctttatgaaatttcctttaaaataatcgataaagataccggagcgttgctgccggacgcggagtttgagctgctttccggaacttctgtgataacgtcagctatatcggatgtaaatggaattgtgaatttcggtggtttccctcagggagaatataccgtgcgggaatcgtcgccgctcaccggttatcagccgattacagatgtttattctgttttagtgacctcagaaggcgctgttacaattaacagcctgcctgctcaggattttcgtatgaaaagcagcagaatacagtaggggaaggcataaaaaaacgatagctcaaaaataaaaaggcgggcgccttatccggcgtccgcctcattttcatttctcctcacggaatcaaagttgtaaaaatgtccgcctttgatgtgacggagttcatgccgtaccgcctgctcctgcaaatttggcggcaggctgctgtttacatatacattataatccccgttttcatcaacgaccgttacgccccgtacgcaaggcggcaggaaaagcggccggacaaaaatatcctccaattttcatcaactccttaacgcctcgatgatttttaccgcctgctctacgtctttttttgtagcgcccttggcaagcttaaagagcattcgcatttctgaacggttttttagctgctccagatattcatcgagttcattattaagactttggcttttttcttcttccggaaggtcacgccctagcagataatcaacagaaacgccgaaaaaatcggcgattttttttgtcatgtcaaaattgggctcccgttttccgctttcccagccgcccacagtggattgtgcgattcccatagcatcggcaaagctgtattgagagtacccagccttttcccgcaattcctttaaacgttttgcaaacaattgtaatcatctccctgattttatttaaacacatttagcgattgaagtcaagggaaaacataaaaataacgctaattgagtttgaataaaaatgagaaacaactgatacaattcatacatgattgctaattcacttgcgccatgataaaattaagaataaactgcattaaaatgatgtcattttgaagataatgaggagaaatgacagcgttaatatgccggctcgcggtgctttaggaactattattatttacccgttctgtacacaggtttgctttgagaaaatattcactggcaaaaattttcccgaagatgcccaaacgcctgctcagctttatcgatggctgattatgagacgaataaggaaaaacaacgtaaaattgcgttttaataaaagcagcttgattactgctccaaaaggagggagaacaaaatgaatgctgaccagggagagttttcttcttttcatccagcggtactgctctgctacttcgtttcggtattgcttattacaatgtttacggtcaatcctgttttcctgctgctctcccttgccggaagcctggtttactgcgccgcgctcagtcatgcgaaggagtttttcaaaggccttgcgttttccgtaccgctttttcttttgataaccataacaaacccgctgttttcccataatggagcgacgccgctctttttcttgggaggaaacgcggtgacgctggaggctgtgctttttggcgcggatattgcggcaatggtaaccgctgtcgtttattggtgcaggtgcgtgtcccatgttatgacaagcgacaaattcttatttctgtttggaaaagcaattccaaagctttcgctggtcctttctatgacgctgcgttttcttcccctgttcctcgggcagtataaaaaaatatttaaagtacagaaagcgatggacataaacgtttctaagcggctgacggggaagataaaagcaagcctgcgtgtgttttccgccgtcgttacatggtcaatggaaaacgcgatggaaactgcggcctctatgaaagcgcgcggttacggaataaagggcagaagcacattttctgtttaccgttttacactgcgtgacggtattatgctggcggcagttctggtattggactgcctgaccgtcgcggggctttctgcaaaatacgcggccttttctttttatccgcgcattacgcaggtttcacttgccccgctcagcataatatcctatgccgcattcgggctgtgtgcgttgctgccatttataatagagggagagggggctatccggtggaaatacttcaggtcgaaaatttaagcttttcttatccaaatacaaaagaaagagctataaaagacatcaccttttccgtatcggagggcgattttatcgttatatgcggagaatccggctgcggtaagaccacgctgcttaaaatgctcaaaagagagctttccccttatggggaaaaaagaggccgggttttgtataaaggacgggagctttcagaactaaatgaaagggaagccgcctgtgaaatcggatttgtaatgcaaaacccggaacagcaaatcgttacggacaaggtatggcatgagttggcgttcggacttgaaaatatgggtatggaaaccaatgaaattagaaggcgtgttggggagatggcaagctattttgggatagccgattggtttcacagcgatacggacaagctttccggtggacaaaagcagattttaaaccttgcgtccgtaatggcgatgcagccgaacgtccttcttctggatgaacccacctcacagctcgacccagtcgccgcgtccgaatttattatgacgctccagcggctcaatcgggagctgggcctgacgattttattgattgagcacaggcttgaggatgttttttccctggcgaataaggtgctcgttatggaaaatggggcgcttatattttatgatgggccgcgtacggttggggaaaggctgatgcgtgaaaaagacagccatcccatacactgtggtctgccaagcgcgctgcgtatttaccgggcgcttggcattgaggcgcagtgccctctaacggtacgcgacggccggcgctttttaacagaacactttctgccggagcgggaagctgttttgccgccggacaaccctaaaacagagacagttttagagatgaaaaacgtctggttccggtatgaaaaaaatttgcgcgacgtactgcgcggcgtttccctgtgtgtttcccgtggggaaagctatttccttctgggaggtaacgcagcgggaaaaacaaccgcgctgcattgcgccgcggggctgcaaaggccataccggggaaaagtcagtatgctggaaaaaaagaaacaaacaggaaaaaacgctgtactgcttccgcaggatccggtgacagtgtttgtacgggatacggtaaaagaggatttagtggaagcctgctcatcagcaaggcttccggagaaggaatgggaagggcagattgaagcggtatgcaggcgaactggaacctatggactgctttcaaagcatccctacgatttaagcggcggcgagcagcaaaaatgtgcgctcgcaaaagttttactgcataaaccggacatcctgttgctggacgaaccaacaaaaggactggacgcacacgcgaaactggagctttccgcgcttctgcgtacacttaaaaaggacggtgttacaatcatcgccgttacgcatgatgtggaatttgccgctgaaaacagcgaccgctgtgcgcttcttttcgacgggcaaattatttcctgcgatacgccccgtctcttcttttcaggtaacacattttatacgacatcagcgaaccggatggcgcatcatatgtaccgctatgctgtaacatgtgacgaagttgtcgccgcctgtaaaagaaatggggtgcgccatgcgtaaaaaagcggtacgttatcttctgatgttcctgggtgttccgctcgtagtgctgttgggtacggttgtatttgcggataagcagtacgcctggatttcccttgctgtggcggtgctttcctgcgtcccgttttttttatcgtttgaacgcagggacgcggcggcaaaagaaatgacgattttggctgttatggtcgctttatccgttgcgggccgttttatgttttcctacctgccgcattttaaaccggttacggcaatcgtcgtgctcgccggattgtatctcggtgctgagtccggtttcctgtgcggcgcgctgtcggcggtcatatccaattttattttcgggcagggcccctggacgccgtttcaaatgtttgcctggggggttatcgggttaattgccgggctgcttgcaaacccgctcaaacgtcataaggcgcttttgctcctttatgcggctgcggcaggcgctcttttttctctgattcttgatgtgtggactgtactatggtgggacgggacgttcaatttcagccggtatctcgcgtcagtcatcacagcactgccgacgacggcagtgtatattctgtctaatgtggtatttttgttttttctttcagggccgattggaaaaaagctcgaacgtgtcaaaataaaatatggcttgaagtaacaaaacctttaaagcaattgacaaggcgtacaggtattcctgtacgccttcgctgtatctgttttttattccctgaatgcttcaaaagccttcgcaaatccacatagcgttttatacggcaacgcacaaatctgcgcgaaatcaaggtttttcgtttgtctctttaaaaagttttgttacgctttgcaacgtacgctcgtagtccggttcccaaaccccgaggccctccccagtgacgtcccttttcatcgcatccgcgggcggcttcgcttcctgcggatgctttcaaacatgcgaggcatacaacttttcacagccagcagattttacaggttttcgcgcaggcgaaaaagtgaaaaatcgcaaagtgtgtactactttgccctgcttgccgctattgtaaacaaccagatagcatatacgccttaaatccaataaggcatagtaaaccctactttgtaaaaacaccacaaatcgtttctccattgtccgagaactgctttcctgctacgtcaccatagaattcaaaactattaaagcctgacgtttgaatctccgataacagcttttctttggaaaagaaatgatcccatatattgtagcaatttattgcttcgtcggtcaaaacaacacattggcgaagctctgtggcgtcctcatcatcgtactgatatacagactccaaacagatatgcggcttctcacaccaaaaaccgccttcttcacagtattgccaggtatggctttcattttttctcatttttggcgtaaaaacatcaacgataaactttccgttttgtcttaacgccttataaatcttgtttaataaaagaagcctgtccgctaccggcagcacggcataatcgcagtagattaacgtgacgacatcaaattgatttttgtaatcaatcgtcagataattttgataacggtactcaatggcgctgttttgctgtatcgcttgttcttttgcatatgcaatcgaacgtcttgaaaaatccacgcctatgacggaatatccggcctcgtgaaaccgctgtgcataaaggccgggaccacatcccaaatctagtaagtatttatattgggagggcggcgcaatttttgaaatccatcgaactgaccggtcgagaaattcatgccttcgggttgccgcgtcctcctgtggattgagatgtgccgccagcatccctttggatatatgcgcgtcattccagaactctccagtgctagaagcatatatttgcggctttgtaagaaaagcgcttaattgtcgaatcataatattcctcctgctctaagtcgaaccacttgtcctgctttggctaaggcgtgtccgtgtagtgcgtctttattaggcatagttaaaaactgatacttgttctacaaacctttagaatgctttcgtaaatacaggcggcttttaggcggcaaatcggtcaatatataaactggttcatttggataaaaaccagtaaccatgcgctttttaacttatagagaagccgtaaccgactggaaaattattcgttatggggtctcaaacaggccggagggaaggtaaatatcctttgtaccaactttgttccaggaaaacaggggaatcagctcatgcacggcggcgggctccggacggtcgagcagccccgcgaggtacgcaagcctcccgattaaatcctgtgctttgaatccacgcgcaagcagcttgtcaagccccatatcctgttcacgttttgaaagccgccggccgtcagcagacagaagaagcgggagatggtaaaattccggagggtcaaatccgagcaggcggtaaaggcagagctggcgtggggtagaggacaacaggtcacgtccccgtaccacctgtgtaatccccatcaatgcgtcatccgtgacaaccgcaagctggtaggcgaatacaccgtcagagcggcgcaggataaaatccccgcattcgctcgcaagattctggcatagtttcccatagtgcccatcctcaaagcaaattgtctcttgtgggacacgcaggcgcagcgctgggctgcgtcgtgctgaaagactttttaattcaccgtcagatagcgcgcggcatctgccgctgtaaatggtttctccatccgacgcatgcggcgcttctgcggcgtgcagttctgcgcgtgtacaaaaacagggataaataagcccctgctccatcaatttttccagctgctcctggtataacggcgtccgtttatgctgtacatacggaccgtgcttaccgccaaggctgccgccttcatcccagtcaaagcccagaaaaagcaggtcctcctccaattggcgggcatattccgctttgcagcggttttggtcgaggtcttccaagcgcagaacaatttgtcctccgtctttccgtatagaaagccaggcaatcaaagcgctgaaaaggtttcccaaatgcatccgcccgctgggggtcggggcaaaccgtccggtcggctgaatttccacgcctgcacctcccttgttatctttttcgattatatccggcacaaccttttctgtcaatcacgattaatccaattggtatatataattatattatatactaactggatagccttgctaaaaagagaatatccgctttcctttctgccagcgcctgctcggcagcagaattaagcctgctgcgggcaggaatattaggatttcctgatacaacgttacgcttatttgtgtttttacgtgcagctttacgaagatgaaaaggagcaggctttgccactaattgcaaagcctgctctttttctatttgtacagcttttatgctattttttaatataaacgggatatgggcaatccaaatggtacccaagcttttccgcaagcgaaacggagcgcaggtcgtgcgcgtcccagctggggtataagccacgctccagacattccaatatcagccttgcaccgcatgcggttgcaaggcctctttgccgaaactgcggcattgtgtctatctcaatctcaatcccgccgcgatagacggcataggaggaagcgcccgaaacaagctttccgttatatagtacggcgacgcccagcccgcgctgtttataatcctcataatctgcaaacagggaacaaaggtctgctgaccagccttcacgaagcgcggccttataaatctgttcatcgaacaatctaagggtaaagccttcaggaatacgacatgtgtattttctgagcaattcgacgggaaagacgcccggttcttttttgattgcgtagcgcgttgttttttctgccctgccgccccacacgtcttcaagcgttttgccccatgcttccgtacggggtatcataattggcgcggccgcctttgcggcaagcccgggattgggcgcgccggcgaagaaacagaaatcgcccacgacgatttctgcggaggaaggatgttcctcgctgtctgttacggcatagcccatgcatccctgcaggcaggaccaaacgagcgcttcctgccagccttcaaacagcggcgcaatttttttataaactgccataatttcgctccctttgctttttatgtgcttttgttatcttccgcgccttttggagagggtgggttactataaatggtatagccgctcttaccacgtttttttgtctggtaaagcgccctgtccgcgcgccggtacagcgtatcaaagtctttcccgtcgcgcggcgctatagccacgcctatgcttgcggaaatatgccagcttatctggccgtccgctgtatggtcgctgcgcagtgcacggcatagctcctctgccttctgccgcgcccaggcctcgtcaggtattgtaaggaaagccgcaaactcatccccgccgatgcggccgaccagctcgccctcgctaaaatgacgcttaatcgtacctgtaaagcttatgattactttgtcgccgtaagaatggccgtacaggtcgtttgcctgtttaaaatcatcaatatcaaatataaagaacgcaaataacttcccgggctgttccgccagtctgctttccgcttttttgcgaagggctgtttttgtatacaatccggtcatttcatcggtctgtgaaagcttcagcatacggcgttgctgccgtttttccgcgtcgatattctgtcggtaggtcagcatatggatggaatcgtcgctttcccaataaataatccgggcggtgatacgcatccagtaataatcgccgccggtggaaatcatgaagtcgtagcgcagggtatcctggccattcttataagcgtgcaaaacattttcaggagaaaacatgtcgaggtatccctgcctgaattcttccttaatttgcttatccgcaacaatccggagcgctttgtcatacggcgtgcctgagggggcgcccaggctttcaaaatattgctcggttaccaggttcgcaggacagttgcgcgtgatatccagttcataaatattttcgtaaagctcttcggtcgcctgctggaatacagtacggcgtttctgttcattcgtacgtgtcaggcttacaatttgccggttgaattttcggataacaaaagtaatcacgaagaggataatggcaatgattgccgcaataatcagtaccgtctgcaatatctgctcattaagcttttgaatcagcaggcctgtatcccgctctaccaccagatgccagcctagttccgggatatacctggccacaatgtaattcattgtattctcgccaggcgtagcagacgtccaaaaactactggcggaatcgctttttttccagtttaaaattacattcttagctgtattgtcataagaataaatatcgaaaaagtttactttttcatatcccgtataatttgtcgaaatttctacagtgccgtccccgccgatgaggaaagcatccacaccaaatttgtcttcataatcacgcagcaggctctgaaggtagccgatacggacgcccacccctacaattcccattgtttttccgttgttatcttttattttacagttgacaaaaactgtaatttcattttgtgcgctggccgcttcatcattgtccacattcatcgtggagtcctcttcgcttttcagcattccaaagtaccagtcgttttccgggtttccctgttcaagtacacggtccaatccgttgaagttataataccgattggttgctgccgaaaccaaaaaaacggaatcatattgatatttggcccggtatgcgtcaaggtattcccgaatcgtttcaatataaacctggttgtcaagctgcgttttttcatcagcaagaaaccccttgagcaggctgtcgtttgccatcgtcaatgaaatattgaccggcttagtaaaaatagaggtaagctgataatatattccctcggaggtaagcgccgacacctgttcaatattctgtacggaggcggtataatttgcctggtagctgagcacagcggtcgttgtaaatccgattataataacaagacatacaagtatgttggttcgcatcagtatgttctttttcatggtgtaacccttctcaatttataataggtatggttaaattctaatagatattgttgtaaaacatatcggagcgaagcgctgtttatcaattttgagtaaaaagcggccattggcaggctcagcttgcggtctgtcttattctatcaaaaattaaatcttttggaaaggtctgagaaaatcccaaataacaattaccaaattgttgtgttttttaccgcaggccggctgaaagcccggattttccacctgattctggcacctgaaaggcaaaacggagcaagcgatacaaagcctgctccgttttgctgaagggaagttccacagcgctccccccaatcattcttaaatattcattgagaaacgggttttatttacagcacaaacagccgttgcacacgctgactgtaaccgaatccgtgttgttgaatggatttgggtcgggcgtctgggaagaaacagccgctgtatttttaataaagccttttgcgcaccggctgactataccggataacaaaatacagattgaaccgcctgaggcaagctctcctaaactgagctttccatcccaaacgtaccatgtttttccgttatcaaccgaataagccggattgcacaattccgaaggcagaaagtcggaaattacaacctgttccgctgtttgcggaccggcgttggatataacaagcctataggttagacactggcagcgagccgccggattttggaaagcggttttttgtattgaaaggtctgctccgcgttcctggacaggcgtgtttactgttgaggtattgttgcccggattgggatcaggcgtcgtgcttgcggcaaccgccgtattggaaacaatgccgcaggcggatgctgataccgtcccgcgaatgagtatcgtcctgctctgcccggcttcaagctggcccagcgcgagcggatttacccacgtataccagctcgcaccattatccagtgaaaactctgcgcccgataattctggcggaatctcgtcatataggataacatcctgcgcgctgtccggtccattgttggtaacaacaatcgtgtaggccagccgttctcccggaatcgcgcctgttggctgtgcgctcttgctgactgagatgtctgcttcattgccgccgctaatctcggtcgtttccgtactggtattgttgtttgggtttgggtcgggcgtatcgctgcgtaccgtggcagtattgataatgcttccgcttgcagacggggaaaccatggcgcgtatcagaacgacaaggctgtctcccgcattaagcattcccaaattacgggggccggtccatggctgccatgtagtaccgccgtccagggagaattcaggattggtaaggtcggctgggatattgtctgtaaggataacattttcagcggcatttggccctgcgttgaagacagccagcgtataagtcagcgttccgcccggctgcactgggtttgggacggaggtttttataatggaaaggtcggcagaaggcgcagccggtatcacgggtgtcacaacagtagaagtattgttgtcaggattcgggtcgggagtaccgctgtttataatcgcggtattacttaggctccctgccgcagaggaggcaaccgtagcacggattaaaacctgcagggccgcacccggctgcaaattccccaggaaaagggtaccggaaaagggcgtccatgtagaaccgccgtcagtggagaattctgcgttttgcagcccgtttgggagctggtcggccaagttggtgttaactgccgccgacggccccgcgttttcgatttgaagcgtataggtgataatctctcccgctaaaacaggactggggctggcggtttttacgactgaaagatcggccgacggctctaccggcgtaacaactgtagaagtattattgtcagggtcggggtcaggggtatcgctgttaacagcggcggtgttaacgatttccccggaagcagaagggctgagtactccgcgtatcaaaacagtttggctttcgcccgctgcaagcgtacccaggggaagagggctgctccagggaaaaaaggtggcgccgccatcggtggaatattccgcattcgacagctcagcggaaatattatcggcaagtgtcacgttgaaagcgggcgacggccctgcgttggacacagttacggtataagtcagcggactgcccgggattgccgggctggggtcggctgtttttaacacggaaatatccgccagtgtaacgacctcaaccggcacctcgttggaggtaacatgaaagacacccggaatgccgccctctaccggtgtgtacgaataggtgatgtttgcgctgttcagggccggattgggcgttgggacttcatctaccgcggctgtgaactcgaccgtgacggtgtccccgccggggatgtccggcagtgtaaatcccacatttggattcacacccggctcagtcaccccgtttacgacgacgcttccgggaacgaaggaaagcccggccgggatggagtcctggaaattcacattagttaaggggctctggcaggtgttggtcaaggttacagtgtaaacaacggtttcaccaacatttgcggtttgcctgtcaaccgttttgacgggaacaaactgcggtacctgtatctcgttgaaggaaatatcgtcgatggcgtaatcatttccaattacctctggaccctcgcttaaaaattcaacggtcaggcttgtattgccctgggagttaacaacgctgccaatctgtttccattccggcgcgtttacattgacgggaatcagcgctccaagggttgcgctgtataaaacgccgccgttttcgtccagaatacgcacgcccagttccggattcggatagccgttgactttaaatagatttagtatccatgatgtaaacagataattggtgtccggctgtaccgctaccgtatccctaaaaaatacggctcccggattataaccgttcacgaccataaagcgtccggtttcgttgccaacagtatggtcggcgatgcgccaccacgcgccaatttcggcgctcatagagtttgtcatgatattctgtacagtgtattccccgcccagcggcgcgaaaaccgcgggattaggcagcacataggtgaagtcaggcgtaactccgggatagggctcagcgggcgcgccggtgttggccggcgtacccggagggaacgtgccgaaggtgcctttgtcagcggcgttaattaaattgtcgccggaaatgattgcgcagggatctaaaatggtctgaaccggcgtataaatgactgggccatttagaaaattttgattgattaaatcagggccggttactgtaaccagcagcgtatccggcgtaagggaatccaggttggtagatccgggcgggggattgaccgcggcggaaataggtggattggcgccggtcggaacgcttcccggcaccgcattatagaagttgcccggagtcaggtttccgccaggtgttccgtaggattctacaattctgtaattgccatttggtacatttaaaatcgtatagttgccgttctcgtctgttaaaactgtcagccgagcggccgtatctatattttggaggactacaggaatatttgcaaggcctgaatcgcccgcggaaatcgtggcgcttctgtccctgtcaaatattaccctgcctgatatggtagccatttttattgtgcacctttctatatgaaattgggttgttttataattttaattaataagctaacagtatggtgaaggatttgcgattagcttaggtctatttttaactgtatgccaatacctctttacatcatatgtagaactgggacatactggtacttagagatacaaacaaatttttaaagattcacttaatcaaaataaatatggatataccgtgaaaagcagaaaggagacagtaagccgctccagaaggcgccgcgtaaaccgcccgtacttttgcttgaataaattaaattttatattaaaaataaactcccctgtaacggcattaagccgttacaggggagttcaagctggtatgaatgtttataagccactgtgttcctgctacaaaatagatgtcagagtggacacccagcttgaccaataaaataacctgcagtgcgcaacttgttcacagcaggtgtgtaaaggtgagacaaaaaaactcggtttttttgaggaagatttgaacccacgtacccgcaaaaagttggcagcgacagcgagcagtcgtgagggtacgcttgcaactgagcagtcgtgccaagcgtgactttttgcggagaaggaggaatgacggagtggtatgagaaaagcccggcctcagccgggctttttgaatggaacgcagtccattccgacattggtgcgggtgacaggacttgaacctgcacggttgttgccaccagaacctaaatctggcgcgtctgccaattccgccacacccgcatgtgcagactattatataataaatccaacagaaaatcaagctaagaattcaatgcatattggattgctttgaaatgctgccgaagccagataaataataaattgaaaattgacatacaattgacaatacggctataataagacgaatgcccggtatggggtagaagagagcagttatttacagcagcctgcgaagctttggaaggtattggaaggatgattagatggcgataagaatagcggcaatcgatttagacggaacgacgctcaatgataaggcaaagctcccgccggaaaacagggaagcaattattcgggcggcaaagcacggtatacatgtcgtgctttgtactggcaggacaaacgatgagcttccggatgaactgctgcgcatatcggagcttcgctacggcgtgttggctaatggggcaaaaatcgttgatttttcagaaaataaagttctataccaggattgccttagccgggaattagcggaacaggcaatccgttttacggagaaatacctctgtatgtgcgagctttatatcgatggtaaggtttatgtgaaacgcaaatgcctagaagatgttacaatatatggcgtaacgccgcgcctgaagaggctggtggaggggacgcgcaccggcgttacaaaccttcttgatttttttcacagcagcggcggggcggtcgaaaagctcaatatctttttcggcaattccgaacaccgaaaagcgtttctccgtgatgtcgggattttttcgggccttgtggaaataaccggttccatggaaacgaacgcggaggtcaacagcaagacggcgacaaagggcaatggccttgcgtaccttgcaaagctgctaggcgtcgatagaagagaggtgctcgccatcggagacagcggcaacgatatctccatgctgaaatttgcgggcgtcgcgcttgctgtggcaaacgcggatgaggaagtaaaacagattgcggatgaaattgtcccggctaatacggaaaacggcgtaaaaacggcgctggaaaagtttttttaaaaaaaggttgacatttccagaaataccaactattataaagaaaatgaaaaggtaaacccatgcgaaagctgggggcacaaagccgcgagtctaaggcatataatttatgctatgattgtcaggttgcaattatattgcagcctggcttttttatttgccggttgcaggaaaaagtggggagttaattatgaaaaagcttttatccgttcttttatgtgcaatcatggtctttggtgcaattccttttgcggcgtccgcagccgtttcggcaacagacctgacaattacgacgaagcccctggccacaggaaaatacggacaggtaacatccgcgcagagcattatcgaaattccggaaaatgcatcgggtgatgttgaaatcccgctggattttctcaacgaatttgaagagaatgtcacaatgcctggagatacctacacctattattttacaattatcaaccattccaagcacacctatgaatacactggccagtcctttgtggtatcggttttaggcgacatgaacgatccgaaatggaacaagttttacagcgagctgttcagcgtaagctttacccgcacgctcaacatggccagcagcagcgacactgactgcggtatagcaaattatatggacactggcagcgacaagtataaagaggtaaacagcctgttgtccaatacgaaaatcgcttccggcgaccagactgtttcccaggccgtatacatcggccttaacggcccgcttatgggcaatgcttacgcaaactgcagcttcagcggcaatatgaaatttatgcttcatgaggctgatgcacagtctgagcccgggcagaacacaggcgacatggtaaccgtaccagtaacaaccccgaaaaagatgtctatccgccttgaggacggcacggtccttcataacggcgacagcttccagatgcctaaggacggaaccgttcagttccagatgtgtacagataactgggaaaccaaccgttatacggacgacggtgagggctttgccggcacaaaagtatattcctttacatattccaataaaaataaggtgctgcgcaccgatacgaacacctatttcatggcataccgtttccactttaagaagggcgattacaacaagcagacgggaattgccaatgttatcgaaacaccgctggaatcctggtctgtcaaccttcccttaggctctaccgttacggcggacgcgtataagggcgctgtaacaaaggtcgacgccgctaacgtctttatcgaaacggcagaggacaaaaccatctgctacacggattactactgggaatattgatactttaagcatgataaacaggagcttgccgataaaaagcaggctcctgttttttgttttccggagggctttacttcttaggggaggaaacctataatataattacagctggctgaaaaacggaggcgtatgtaatggaccagagcgctatgctccaaaaaatcatagacgaaagcagccgcattgtatttttcggcggagccggtgtcagcacggaatcaggcattcccgacttccgcagcgtagacggcctttataatcagcagtataaatacccgcctgaaacaatcctgagccattctttttttgtaaggcaaacagaagagttttttcgtttttataaaaacaaaatgctttatttaaacgcccggccaaacgccgcgcataaaaagctggcgcaaatggagcgtaacggcaagctctcggcaatcgtcacacaaaatatagacggcttgcaccagaaggcgggttctgaaaaggtttacgagctgcacggcagcgtccatcgtaattactgtacctcctgccataaactgttcgacgcatcctatatcctccacagtgagggcgccgcgaggtgcgatgtgtgcggctgcctgattaaacccgatgtagtgctttacgaggaaccgctcaacgaccaaacggtggcgggcgcggtagaagcaatagcgcgggctgattgcctgattattgctggaacgagccttactgtctatcccgctgcggggatgattcgctatttcggcggaaacaatcttgttttaatcaacagggatgaaactcccgccgactctatggcgcggcttgtcatccacggtaaggttggtgaaacactcggcagcgttatattgtgaacacagtgttaacaaaatctgccgataattgacaggctgtttcaaaatgctataataaattccagtaagctccgtccgctttcgcgggcggacttttccgcgttttttaaacgccgatgatattgaaaggaatgacagaaatgagaaaaaagagctttaaggcggaatccaaaagacttctggacctcatgatcaattctatttatacgcataaggagattttcctgcgtgaaatcatctcaaacgcgagcgacgcgctcgataagctgcacttcgtgtcgctgaccgatgaaaaggcaagggcgtttgccgacaacctcgccattgaaatttacgcagacaaagaaaaccgcacgctcaccgtttccgacaacggcatcggcatgacggaaaaagagcttgaagaaaaccttggaacgattgcgagaagcggctccctccagtttaagcaggagcttacagaggaggataaaaacgacattatcggacagttcggcgtcggcttctattcggcgtttatggtttccggcaatgtgacggttatcacaaagcgttacgacagcgacaccgcgtacaaatgggtttcaaacggtgcggacggctatacggttgagccatgtgacaaggaaaagcccggtaccgatatcatcatgcatataaaagaagacaccgaggacgaaaattacagcgagtacctggaaagttaccgcctgcaaaatctcgtcaagacctattccgactatatccgttacccaattattatggacgtacagcagtcggtcaacaccgccgcggagggggaggaccccaaatgggaaacggtgaccgaacgcaagacggtcaacagcatggtgcccatctggcagcgcagtaaaaaggatgtatccgacgaagaatgcgcgcagtattataaagagcattttggagatatgcaggagcctctcgcgacgatacgcgtcagcgccgagggccttgtatcctacaaggcgatgctgtttattccggcgacgctgccctacggctactataccaaggattttgaaaaggggcttcagctctattccagcggtgtgctgattatggacaaatgcccgcagctcctgcctgatttctttggctttgtcaagggcgtcgttgattcgcccgacttgtccctgaatatttcaagggagcttttgcagcacgaccggcagctttccgtcatagccaaaaatattgaaaagaaaatcaaatcggagcttatccgccttctaacggacgattttgaaaagtatgaagccttctggaaaaactttgggcgccatatcaaatatggtattgtaagcgattatggtacacataaggagcttttgcaggatttgctcgtgttccattcctcaacgcaggaaaagcccacgaccctcaaggattatgtgtccagaatgaaggaggggcaaaagtatatttattatgcgtgcggagattccgtttcgcagattgcgtccctgccccaaacggagctttgccgtgacaagggctatgaaatgctctacttaacggaggacgtggacgaatttaccatccagtcgctcatggagtttgaagaaaagcagttcaaatccgtaacggcggacgacgcggagctccaaacagaggaagaaaagaaagaaacagaaaaacacagcgaagaaaacaaggacctgctagagtttgtgacgaagagcctcgacggaaaggtcagcaaaactgtgatttcagataagctcaaaagccatccggtttgcctgtcctctgaagggcctgtcaccatcgagacagaaaaatattttgcatccatgcccggcagcgaaatgaagccgaaggcggcgaaggttcttgaactgaacgcggggcatccggcgtttgaatcgctcaaggcctgtttcgcttccgaccaggaaaaggcaaagaaatacgcgcaggtgctttacagccaggcgctgctgattgcgggccttcctgtcgatgacccggtggcatactgtgaccttgtctgcggcctgatgtaacgcttgtacgaacatgtatatttttatagagagatatctgtgaattttcgattccctcttttctattcgctggatttatgatataatgaaccaacatcatcgtaaatgaaaggaattactagaatggacgtcattataaaactgtttcagacccagtggatgtttctggccgctgccgtcgttattatagcggcgatgttcctcgtcaaaaaatttgctccgcagatatataaaaaattctgtatgattgcgcttgctgtaacggtggttgcactaattttatttgcgctcatattcaaactgcctgacctgtttctcctcataccgatttttatactctgctgtgaattgtttggctacgatattacaggcaaaatcgtcattgtgttcctcgtcgactatatcctgatttgccttctgaattttgcttttgtcagcgggtggattaataatgtaatcgatacgattattttctttgcgctccaggtcgcaacagccatttgcgcaggccttgtgcttgaccgccacctaaccattcttaaaatgaaaaagaaggctgcgctagaagcgaaaaagcaggaggagcttgcgcagaatgaagagctggacagccatatcgatgatgtatttgagaaatacaagcaggatacggattcttccgggcaaaaggaaaacgacgaaaacaagccggaactataataaggcgcataatgcaaaggcggaacgaaaaaccttcgttccgcctttttacgtccggcaggcgccgggcgtttatttttgctgcattttacacgcgttctaccttatttgaccgcttttaccttaatcctgctgaacgtttcgaagcacgtaccgtccggctgcagcgttttatgcagcatctcgtcaatcacttcgcttcggaaccgttcctttaaaccggcgggaaccactgtcaaaaacggaacaatcgtaggttggtctaaccatcttatcatttcatcggcactctcaaaataccggtccacatgttcttccgttacctcaaactcagaaaatgcggcttggctgattaatttttgatactctggttttgaaggcataaaccacggccattcaaaatcgcggaaataatccgtgtatttgtcctcccgcatttttttccgtatgactttaaaaaagttcgtgcaggttccgtctcccgcaaaattccaaaaaatcctgccgcctggttttaaagcggtaaagcttgcgtttaaaagcctttcgtgattctttatccaatgcagcgcggcgtttgagtaaataatatcgaacctgtttacaaagtccatttcgttcatgtccagccgcatgaattcaagattagcccttctcagctttttcgcggtttgaatcatcccatcagaagcgtcaactcccaggacatacccgcgcggcgtgagcacagccagctgttctgtaagaatcccgtcaccgcatcccaaatccaatatggattcatcgccttttaaatcgagctgcgcaatcaatttgccgccccactctttttggtgctttgaagcttccttatacttttctccgttgaattcatatgtctgcattgaaagatacctccctgtaagctaaacagctttgtatcaatttaatgcttttcctctgaattgtcaatgcctcgtccgcgttttctttctaaatatcagttaatgagtggaaaacgcgctttccccgtaaactcctgataagctctatttttatttttaaaatataaaactgtatatttctttttctccgcggcaaagatactaatacgaataaagaactggttttatacctttatcagcaggaggtttttgttgtggaaaatataccggagaataataacagcaatcaggaaaatgaaaaggataccgcaaatcccggcacaaagaagaaaaaatacagcaagggcttttatgtggcgcttgccttttgcctgttggcaatgggggccgccgcgtggacgacctacagcagcgtgtccgactatatgaagcccgcgcccattgtggagaagactacaacggctagtaccagcaaggataagcaggcgggcgtaaatgtcagcggcgtaccggcgaacgatacgaccgacccgacgactgctgcttccgcccagacacagccgaccgacgcgccgacacagccctcgaccgacagcgcaacagaaagtgcgacagaagcagcttcatccaaagaacttgtatttccagttggagataaaatcgttaaggaatacagcggcgatacgcccgtctattccaaaaccttcaaggattggcgtctgcataaggggattgaccttgccgcaagtaagggcgacagcgtacagtcaatcgacgatggcactgttttcgaaataaaaaaggacagtacgctcggtactgttatctcggttgagcacaattccggttttgtcgcgtattactgcggcgtcaaagccggcgataatgtcaaggaaggcacgcatttgtcggccggcgatgttttaggcacagtcgaccaaataccgggtgaaagcaaagacgaagcgcatctccatcttgagattaaaatggatggaaaaaatgtaaacccgtctgaaatcctgaataagaaggccgatgcctgaatagattgaatatggaagccctgcccccgccagcgttacaggggcacagaaaagggagaagaaggaacacggcgttcgtgtccgttcttctcccttgtttatttgaggttagggtattaataattcgcttcgcggatttttacataaccggcgataagctccaccgcctgctctaacgtcagcttgccgctattgacgcataaatcgtagttttccggcgcgctccacttgcggttggaatagaaattatagtagttcgccctcgtcttatccgttttacggacagccgattccgctttatcctccggaacaccgcgtaccttgatagcgcgctggatacggtaatcaatgtccgcgtggataaacaggctgatgcagtttttgcggtccttcaatacataatcggcacagcgccctacaatcacacatggctcctctgccagctgtttaatgattttatgctggaggagatagagctggtcgttgaccgggaggtcgcgaatcggcgcgtatcctgagccgagattatagatgcccattgaaaggctgtaaagcaggctgttcgtagcgcgctcatcaacgttttcaaatatttcaggatttacgccgctttctttggccgccagcgaaatcaattccttatcataaaattttattccaagcttttcagcagccgccttgcctatctcccggccgccgcttccgaactgtcttcctatcgtaatgaccgatttacaactcatcaaaaaacctccgtcgttatatttggattactttgtacatattatagcattttttgcttaaaaaactatatgaaaaactgcataaattttatttgtttattttagtgaattaaatcagcgtaaagcagcacattttgttaaacgcctgcggggtacccgcataatatattgatactgttattgctgtttgataaagtttcactacactaaaaaaaatttaaaaattatcttgacttttgtcgaaccctttcgtataatagaacagctgtccgagaggggagacaagggtaaagcaaaggaaagataaaaaagcccttgacaaaaaggagtgtatgtagtaagataatatacacgccgctcggagaaggacgtgcttttttacctgtggaagcaggcggaaaaagacggattttgcagggcagtaacaggaccttgaaaattaaacaacgcaatcatagtaaagaaacccgtaatactttgagtggggaagcgaaagcagtactcacaaaaagaagagaggcgaaactctaaaaaagacgcggtgaagaaaacacggaaaaattgaacgatacgtcaagtgtcgaaatgagcatcaaagctctggaatcggtagtaacccgaaagggttaatatacaaattttagagagtttgatcctggctcaggacgaacgctggcggcgtgcctaacacatgcaagtcgaacggagttatttaaatagaacccttcggggcgacgtttaaataacttagtggcggacgggtgagtaacgcgtgagtaacctgcctttcagagggggataacgtcctgaaaaggacgctaataccgcatgatatatttgtgccgcatggtatggatatcaaaggagcaatccgctggaagatggactcgcgtccgattagctagttggaggggtaacggcccaccaaggcgacgatcggtagccggactgagaggttgaacggccacattgggactgagacacggcccagactcctacgggaggcagcagtgggggatattgcgcaatgggggaaaccctgacgcagcaacgccgcgtgaaggaagaaggttttcggattgtaaacttcttttctaagggacgaagaagtgacggtaccttaggaataagctccggctaactacgtgccagcagccgcggtaatacgtagggagcaagcgttgtccggatttactgggtgtaaagggtgcgtaggcggcaatgcaagtcagatgtgaaatgcacgggctcaacccgtgagctgcatttgaaactgtgttgcttgagtgaggtagaggcaggcggaattcccggtgtagcggtgaaatgcgtagagatcgggaggaacaccagtggcgaaggcggcctgctgggccttaactgacgctgatgcacgaaagcgtgggtagcaaacaggattagataccctggtagtccacgctgtaaacgatgattactaggtgtggggggtctgaccccttccgtgccgcagttaacacaataagtaatccacctggggagtacggccgcaaggttgaaactcaaaggaattgacgggggcccgcacaagcagtggagtatgtggtttaattcgaagcaacgcgaagaaccttaccaggtcttgacatccagctaacgaagtagagatacattaggtgcccttcggggaaagctgagacaggtggtgcatggttgtcgtcagctcgtgtcgtgagatgttgggttaagtcccgcaacgagcgcaacccttgctgttagttgctacgcaagagcactctaacaggactgccgttgacaaaacggaggaaggtggggacgacgtcaaatcatcatgccccttatgacctgggctacacacgtactacaatggccgtcaacagagggaagcaagaccgcgaggtggagcaaacccccaaaaacggccccagttcggattgtaggctgcaacccgcctacatgaagtcggaattgctagtaatcgcggatcagcatgccgcggtgaatacgttcccgggccttgtacacaccgcccgtcacaccatgggagccggtaatacccgaagtcagtagcctaaccgcaaggagggcgctgccgaaggtaggattggcgactggggtgaagtcgtaacaaggtagccgtatcggaaggtgcggctggatcacctcctttctatggagcaaagataaggtgaaaaagacttatctaatccaaggtcaggttatgggaagtaaagaaaagagagcgttgtttaattttgagggtcttgggaacaagatcttcaaagtgaagataaagacgggggtatagctcagctgggagagcacctgctttgcaagcagggggtcagcggttcgatcccgcttatctccaccagcgggtgaccccgcgggacatgacgtgccagaggcttgaaagagcggaagacgcaggatgtcgcggagggaagcccacaaaaacggataacaggaatggaatctgtggaaaaggctgaagtagaagaacagccggcaactcaaaaggatatgggcttatagctcagccggttagagcgcacgcctgataagcgtgaggtcggtggttcgagtccacttaagcccaccagcgggtggccccgcgggacacgacgcgccagaggcttgaaagagcggaagacgtagaatgtcgcgaagggaagcccacaaaaccgaataacagaaatgttgttcagcgggtggccccgcgggacacgacgcgtcagaggcttgaaagagcggaagacgtaagatgccgcgaaggggaagcctacaaaacggatgacaggaatgttgcccaaaaagcgaacaggccggaaagggaagcggaagcataactggaagggctgggagcgctgcaccttgaaaactgaataaagaaagcagaaaagcgaaaaagatgtaatgaaacgagattagagattcatgaaaatggatcgatttttttaatcaaaggtaaattactacaattagcaaaaagcagcaagatagcagaaccaagagaaactcacatggtcaagctacaaagagcacaaggggaatgccttggcaccaggagccgaagaaggacgcagctaactgcgaaaagccacggggagccgtaagcaggcgctatatccgtgggtatccgaatggagcaatccggctggagtcatgtccagtcatcctatactgaattcataggtataggaggggaaccgcctgaactgaaacatctaagtagggcgaggaaaagaaatcaaccgagattccgctagtagtggcgagcgaacgcggaagaggccaaaccggaggtagtaataccaccggggtttggacagcataaggtacgcaagcgcttaggagaaaggtatgggaaggcctgccaaagaaggtgagagccctgtatccgaaaagcgtaagcggctggctgtatccagagtaccgcgggacacgtgaaaccccgtgggaagatggggggaccatcctccaagcctaaatactacctggtgaccgatagagaacagtactgtgaaggaaaggtgaaaagcaccccgggaggggagtgaaaaagaacctgaaaccttgtgcttacaagcaccgagagcccgtctaagggtgatcgggtaccttttgtagaatggtccggcgagtgaatgtatctggcaaggttaagcacttcaggtgcgcagccgtagcgaaagcgagtcttaactgggcgcataaagtcagatgtattcgacccgaaaccgggtgacctacccatgtccaggttgaagtggaggtaaaactccatggaggaccgaaccgactcccgttgaaatggtagcggatgaggtgtgggtagcggagaaattccaatcgaacccggagatagctggttctctccgaaatagctttagggctagcctcgaaatagattaccggaggtaaagcactgaataggctaggggccgagaggttactgaaccttatcaaactaagaatgccggataatcgtttttcgggagtcagacagtgggagataagtttcattgtcgaaagggaaacagcccagacccacagctaaggtccccaagtatcattaagtggaaaaggatgtggggttgcccagacaaccaggatgttggctcagaagcagccatacattaaaagagtgcgtaatagctcactggtcgagtgaccctgcgccgaaaatttaacggggctaaatgatacaccgaagcttgggatgacgcaagtcatggtaggagagcgttctgtaaggggagaagtcgtagcgaaagcggcggtggactttacagaagtgagaatgccggaatgagtagcgagaaatatgtgagaatcatattggccgaaagtctaaggtttttggaggaaggttcgtccgctccaagtaagtcgggagctaaggcgaggccgaaaggcgtagtcgatgcacatacggttgatattccgtaaccgctgaaagatttaaacaaagggacaccttgaaagggcataaccccggggttggtacaccggggcgtaagggaccgaaatttaagtagggaagtatgcatggacgagggcgagaaaagctttgcgaatatctgaggcgcccgtaccgcaaaccgacacaggtggacaggaagagaattctaaggccaacgggagaaaggtagttaaggaactcggcaaattgaccccgtaacttagggaaaaggggtgctcactaaggtgagccgcagagaataggcccaggcgactgtttagcaaaaacacaggtctctgccaaatcgaaagatgaagtataggggctgacacctgcccggtgccggaaggttaagaggaggagtgcaagctctgaattgaagccccggtaaacggcggccgtaactataacggtcctaaggtagcgaaattccttgtcgggtaagttccgacccgcacgaatggtgtaacgatctgggcactgtctcaactacctgcccggcgaaattgtagtaccggtgaagatgccggttacctgcgacaagacggaaagaccccatggagctttactgcagcttgatattgggtttcggtaatctatgtacaggataggcgggagactaggaaaccagtgcgccagcattggtggagtcaacgttgggataccgctcttaggttgctggaattctaacctgcggccatgaatctggtcgggggacattgtcaggcgggcagtttgactggggcggtcgcctccgaaagagtaacggaggcgctcaaaggtcagctcagcacggacggaaaccgtgcatcagagtgtaaacgcgtaagctggcctaactgcgagggtgacggcccgagcagtaacgaaagttggagttagtgatccggcggtatgtgaatggaaatgccgtcgctcaacggataaaagctaccctggggataacaggctgatctcccccaagagtccacatcgacggggaggtttggcacctcgatgtcggctcatcacatcctggggctgtattcggtcccaagggttcggctgttcgccgattaaagtggtacgcgagctgggttcagaacgtcgtgagacagttcggtccctatctgtcgtgggcgcaggatatttgaggagcgctgtccttagtacgagaggaccgggatggacgcaccgctggtgcaccagttgtcacgccagtggcacagctgggcagctatgtgcggaacggataaacgctgaaagcatctaagcgtgaagccggctccaagattagatatcccatcgagtaaatcgagtaagaccccttgaagactacgaggtagataggctgtgtgtgtaagcgtcgtgaggcgttgagcttggcagtactaataggtcgagggcttgaccatagagttatacttgggaaagcgcgttagtgatttacatcaaccacatcccttctttacatctccttctctccctttctttattcggtttttagggcgcagcccagaaatgcaccattagctcagttggtagagcacctgactcttaatcagggtgtcccgggttcgagcccctgatggtgcaccaaagtggtacatgaggaatgtaccagaaaaggggctaagggacggaaagagccttagccccagcggtatatggctcgttggtcaagcggttaagactccggcctctcacgccggcaacgcgggttcgattcccgcacgagtcaccaaagacagcaaaagaaaaagaaaaaatagaaaacgatgcatatttacgcacgaaagtgtgataaatatagatagtgtgggtgagaagcccatgcaaagagttggtgttgaaggcgctgagggtccacccgttcccatcccgaacacggaagttaagctcagtagtgccgaagatacttggctggcgacggcctgggaaaatagggagacgccaacataaataatcctcaatagctcagttggtagagcatgcggctgttaaccgcagggtcgttggttcgagtccaacttggggagccaaaaacaggagtatccatcgaagatgggtgctcctgttttttgttatacaatatgggtgcgcggcagtaaccctgcgtgggaacagccgcaccggctgttaactggcgcaaggcctgccgccgccagcggcggaagcaggcgggctttgcgcaggaagaaacagggagaatcagcgccgctccaaggcgctgaggcgacctttgtttctgaccgatttggtcgttggttcgagtccaacttggggtctgagcgcaaagaaaacggtccggtggaccgttttcagcgaagagcatcacagccggtaacacgccggaggcggggtggctgtagccgacttttgatagaaaattaaagggcaatctttcgaaccctgtttcagagcgcctgcctttatggcaggcgttatacacgaatgtacttctaaaatcagaaaagagtgctttttcagccttctatcgattgtttccattctgacagccacttgtgtttatcttttgctacggcgtcaacaattgaccttccagagtcgaacctgtcaaaggttccggaggaaatttcatttaaaaccatattgagtattttttcataatactgttctggattcgtattacttcccgtttgagaaaaatattgttgtgtttcctgctgtgagaaactggcgtatatatccttgacttcctgcattaatttttcgcgattcatagttatctcctttttattaatattccctatgaatatggttgctcttctttgcggatttatacagagaatacttaatagcagcttgcctatcggccgtgggagataaaaacagactgtaaacttatgaatgtccgtattcagggttggttatgaacgtaatctgtgagtatccaatcaatctaaacagttacccgtctggtcctccctgatgggattaaattgatttagcaatgtggccacaggaccaaagcggttcccggtgttttccctgacttttcagcaaaaaacggacagccgcattgctgtccgttttttgctatgagtttaatatgatttaagaccacacagatgtctgtctcggctgtccaatatcataatcgtttgaataccgggccaaatactgcatgacaagaagcacatctgccatgttgacgtccccgtcgttatttatatcagctgctgtcaggccgcttccagcgagcgtttttatgcgggctaaatgcttttgcatagaaagaacgtctgaaaggttgactgtgccgttttcatccgcgtcgcctaccaaaacggtaacagccgtgttaggatgataagctacggctgcacagttgtattttccgcccccgctatgctccatcgcaatatgaattttatcttccaaatccggcgcgttcaggtcatatgtttgctgtccttcgccgttattataaaggacacggtcgtagcccgcgggcaaaacggccttgaaaatattgtttcctacatatgtcatttcctggccaggccacttaaacgcctctccgcctgaattccaggtgtagaagttcaccgtcgtccattttgtcgctgaattgtcaaagtatacgacccgcttaatatgggatagtatttcgttttttgccgcttcctttgcaagagcggcgtctgatacaagagtggcgttatgtatcttcctgataccgttttgcaggcgctcggtaaggctctgaatttcttcctcggtataatgaacggggtcaatggaagctgccaaatccttcagctcgtcagaaaattgcgaaacagcgccgttaagcccttgctcagtaccctggtacacagcccaaacgccgtcggttccagatacggtgctttggtatccaggcccattgctagtgaaaatcaagctgtcgtgggcacgaactctttgcgttgcaagctggggagagccgttgttgttaaaaataatccagtcaaatccggcgggaacagtcgccatataaatatcgccgctaaccctcgtcattgctttgccgggccattgctcttcaaagccttgagcaccccatatgtaataatgcggaacggaccatctggtgctcgagttgtcataatatactgtccttgctgttttaccgtcgtgcggctcagagaaaaagtgactgatatcgtaatcgtactcctgcaaaacagccgcgatttccgcgcaggaaacggcggactctattctgccaagcacatcctgtttcttgttttcgaacctttctttttcggcgcttgtcagtgcgtattctggcattttataagacattgtctttacttcccttattgctccgctgatgttttccgcagttgcggacacaaaacccgcgctattgaaaaagtccgccctgctttctatgaagccctgcagctggctgatgcctgattccaaaccagcacggttccatcttttttgattcagggcataggaggaagctaccgacttgccgtaatcgccgaggctttttaatatgctgctgccgttttggctttcaccgagcaatatgcgtaccgcgggatatacattgcccgtccattgctccatcacgagcttttggaaatcgctgtgcatacaaagcgccgaataaatggtatgctccgcgtcgctgatacgcctgctctggtttacccaccatgtgtaagggtcgctcaaatcgacgccatgctgcgtacccagaaatcccagcccggcatcccagtcccacgttgggcctgaatggagcttaccgtctccggctttatccgtatccttccaaaaatagcagctgttcctgcccgcgtcaacattgacggctagctcctgcaaaagatagaatttcgccgctgcctgtgcgtcaatatagtcggtataatactttctcttggaattgtagcctgtttcggagtagatggcttcctccatatcctcaacaaagcccttgatgtacgcaacctgttctctcgatgcgttttcaggcgacttaatcgtcaccctttgcccgcgttttgttacaaaaccgctgggctcgctgtaatagcggtaatcgtcaaattccagcaggtatccgccggtaatatcgtccgggttattgggtatttcatagcccttcatcgagtcggcctcagggtcgttcggaccaaaacgcggatagctgtccagctcatccgaattgacgtcctccgtttttttggtaaggtcggtaatcttcaccaaattgtttttcccgacatcgacccgttcaatcagctggtaaatgccgaaatactcaccgttaatcaccaagtcaatatattctgaatgcggcgaatattgcaggccgatttcgcttgcaagatcatgcatgattttatgccggaatacggtcggctcgctgtgaacagccagaaggctccactttttgctggaatccattcccagcagggaagaggcggagggcagctttatgttatacggctttttgtccaaagtccaggaggtattgccgcggcccttgatatggtcgagcgccccgtcatattgagccgttgcttctcctttttccgccagcatcattttaccaggcatttttaattctttatcctgatggacaagggacaggtcgtcttccgtcgtaataaacatagcgggtaaatcatccgccttcattacgacgatattgtagcgcttcccgttgtttgtcaaaacaaattctccgccgtttgaggcgctgaatgccgcggtcggctcgccgcttataagcgccgtttcaccaacgcgcgcttcgccctcaaaggtatgccagatggtcaggctttccaaatccgcggttgacggcaagaacagataatacttgccatccgtatctttatgccatttaacagccgagatgtcagaagaaaccagcgccgaaccatccgcccacagtgtgtttgccgcgccgtttaaaacatattcaggtgtttttttatcatttccggcctgataatcccatgtgccgtcggcaaggcagcgggggataaagagcgggtcgtcgaggtcagatgtcctgaaatccacctgctggaaatccacaaggttgttgtccgtatccacataccgctcgctgcctgcgcttaagcgcacgtaacctttttgcttggactgcgcatctgacgcgccctgcatgatgcaagcggtttcataaccgtccgcctgctgagaagggacggtgggcgcgccgtcattgccggaaacgccgaacatatcgacatagccctgtgtcctgcctgccccgtcgccgtcaaaaggattatgaagcgaaggggggagcagctgccggtttgccatgataactaccttgacgccttttgagtggagctttgcaagcggcagcccaaaattttggtcaaacgtttttcctgtaaggtcaaggcgtcctttggtgcccgtgccgcctgctgaaccgctttcgtcgcccatgttgacaaggaatgaatggtgcgccggtatttcgccttcaaggtcgagcttttcccagccaggcgttttatctgaatccatgcatttgtactgcagggagtatgtatccgaaaggctcacgctgaattcgttgggattgtaaatttcgacaaagctgtgcgttccggcggacgagctgtctgtcccgaaatagaccataccaataaccagttttgccggttcagaattgctttttgcctgtgccgagccgtccggcagggctatttgggatgccgcgcgcatggccggaaattgcatggcggacagcatacaaacggtcaggagcagtgatataaataatcgaataccgcctcttttagttttcatataaatcaattcctttcttcatttcgcagcattgtcacacaacgatttgggccacgcatcagcctgccgtatgggtggctcacgttttttcgtaaggcagagcagtgctgcctttattatataggagtaaaactgtgaagtaaaggaaaaaatatgctattcgcattatatgatagaattttgtcgaaaaattttgtttatataaacaagggggagcaagggcgtttttaataccgaacggaatgagccgccgcgtttataagtactctgctgtctgaaattcaaaatagaaccaatatcatcaaataaagggccggcgtcacttcgacgccggccctttagggttagcctgatattcagcgggagctgaacacacattttatttattcaaaaaagacttaaccaaagcctccagaagatcgtcgcggtctatcttactgatgatgttgcgcgcgttgtggtacgtcgtgatatatgtgggatcttctgaaaggatgtagccaacgatttggttgacagggttatagcccttttccttgagcgcgtcgtaaacggtcgtcaatgcgcgcttaatctcgtcgtccttgtctcctccaagcgagaatatcatcgtcttgtcaaacatgattccacctccggtatttgtattgtactacgcggcatgggaaagttcaataattatttgtgaacttttcaaagtcctcttccttatctttttgcatatcagctgcgtaataccgctcccactttgtcgagcgccttcataatacgcttgacagtagcggaagcctgctcgtctgtcagcgtgctgtcagcgcttctcaaggtaatgctgaacgcaacgctttttttgcctgcctcaatctgcttgccctggtagacgtcaaacagcttgagggattcgagataactgcccgcggcggaggatatcgccttttcaagcgtcagcacagggatgttttcatcacagataacggcgagatcccttgtaatggccgggtatttcggcagcggcttatagctcttagcaagctgcgcgtttttgtacattacgtcggcgtcaaggctcatagcgtaaacccttccggcaattccatagtttttggcgcattccggatgaatttcaccgagtacgccgagctcctcgccgccgattgtaagcactgcgcaccggccgggatgatatccaaacggttcgctgctcgcttcaatgtcccagccgtacacgccggccttgtcgagcagcgcctccgcaatgcccttcatggtaaagaaatcgatatccccgccgtacatgccggctataagcttgtttttctcaattggcagttcgtcgggcgcggtcgggatatattccttcgcaagctcaaacaggtgtgcctgcgggttgcggttgttatagttcttagaaaggatttccatcatggagggcagcgcggtcgtacgcataatgctcgtgtcctcgccgagcgggttggagatgacgacggaattcctcaaagggtgggtttccggcatcagtacctttccgtaatatttggggctgatgaacgaataggtcattatctcagaaagccccatcgcaagcatggattcgctgagcatctggtcgaacttctggcgcgcgctgtattttccctgcgccccgccgctgattgccgtggactttatcacgttatagccgtagaaacgggcaatttcctccgcaatgtcggccttatgctccaaatcggggcggaaggtcggaacgatgatgtcgctgccgtcgatttgacactcgattttctcgaggatttctaccattttttcacgcgggatgtctgttgcgaggaacgagttaatccactgcgggtcaagccctatccgccgctccacgttctggtagcagaaatccgtaatgattccatccatcacgtcgcccgcgtccaaaagctcaaccagctcgcacgcacggttgagcgcaggcaggcaggcgttcgggtcgaggcccttttcatatcgggaagaggcgtctgtacgcatgccgtgctgttttgccgtcaggcgaacggagcttcctgaaaagtttgcggattcaaacacgatggtcgccgtgtcgtccataatgccgctgaattcgccgcccataacgccggctatcgcaaccggcttgttcgcgtccgcaatgacgaggttgttatccgtaagcacgcggtcgataccgtcgagcgtcgtaatcttttcaccgttcctggcaaggcgcacgcggatttttccctcgtcgatatagcgcaggtcgaacgcgtgcatcggctggccgtattccagcattacataatttgtaatatcgacaatgttgttgatggggcgcacgcccattgcgcgaaggcgttcgcgcatccaacgcggggagggcttcacccgcacgttctttacaatgcgcgcgctgtaaacccggcacaaatccggcgcttcgattttaacgtcgagcaggcctttacagtctccgccgccgccctttacaacaggtgtgtggagctttagctcctctccgaaggtcgccgccgattcccttgcaaggccgatgacggaaaagcagtccgggcggttcgaggtaatctcaaattccaccttcgtatcgtctaggccaatcgcgctgcggatatcctggccgatttcacagctctcctgcaaaacgaaaataccgtcctcgactgcataggggaaatcatgctgtgtcagcccaagctcgccgagagagcagagcatcccgcagcttacaacgccgcgcagcttaccctttttgattttcgtgccgtcggtcaaaacagaattgtccttcgcgacgggaaccaggtcgccctccttgaggttggaagcgccggtaacaatctgtaagggctcgtcccctccggcgtccacctggcagacgacgagcttgtcggcgtccgggtgcttttcaatcgagaggattttaccgactacgacgttttttattttttcgccttctatttcatagccctccaccttcgagccgctcatcgtcatcgcttccgcgaattctcttggcggcatttgggctttggtgaattcattcagccatttcatggaaagattcattttatacgcaactcctttcttttgggttcatcagaactgattcagaaaacgcacgtcgttctcgaagaacaggcgcatatcgtcgattccatagcggcgcatggcgacgcgctccaaacccagcccaagcgcaaagccgctgtatacctccgggtcaatgccgcagtttgaaagcaccttcgggtgcaccataccgcagccgagtatttcaatccagccctcgcccttgcacaggcggcagccttctccatggcagctgaagcactgcacgtctacttcggcggacggttctgtaaacgggaagtggtgcgggcggaagcgtacgacggaatcctctccgtataagcgcttgacaaaggtttcaagcgtaccctttaaatcggcaaaggtaattcctttgtcaacgacaagcccctcaatctggtggaacaggggagagtgcgttgcgtcgaccgcgtcgctcctgtaaaccctgccgggcgaaataacgcggataggcggcttttgctgttccattgtgcgcacctgtacgggggaggtctgtgtccgcagcacaatattgtcgttgatatagaaggtgtcctgcgtgtcgcgcgcgggatggtttttcggcatgttaagcgcttcaaagttgtagtaatcggtttcgacctcggggccttccacaatatcaaagcccatgccgacaaagatttccttgatttcgtcgagcacaatcgtgagcgggtgctttgctccgagcacgggcttttttcccggcagcgttacgtctagcttttccgcttttaattgctcgagctgttttttctcatttagctcctgtaccttactctcgattgcatcctcgataaaggtgcgcacctcattcgcgagctgcccgataaccgggcgctcctcaggcgtgagcttgcccatctgctttagaatagatgtaagctcgccctttttgccgagatacttgattcgcagctgttcgatgtccgccgccgcatgtgagccttcaagggcttcctttgccgccgcgcggatggactccagttgatttttcatcgtggatttcttcctttcatcagttgttattaagcctttatgcaagagtatgggaagattttggcaaaataaaaagcctccgtcctccgaagggacgaaagcaaacttccgcggtaccaccctgttttttgcaaaagagcaaacactcctgcggcatataacggtgcctgccgtcgcggcctagtggagttgctcgttcagccgcgccgctcaaaagggaacttcaccgcctcaaacccgccggacgccctttcagccggggagcgccttctctggaaacggggtaatatgagggattacttcctttatcgctgcgttttggtgattgattcagcttattacagactataacaccaattttaaaaaaaatcaataggcgtaagaacaaatccaacaataaatattgtaaacagaggtcttctgtgttatcattctataaataggaaaaacacaaaaggacggatgttacagtcatggatatttttgtagaacagctcgtaaagaaagaaaaaacggtacgcgaccggctgattacagtatgtatcgtcctgtgcgtcgtactgctgccgcttgcctgcgttgcgcttgcttatattacaagcatctattactttatcatggttgctttttttgtgctgattgccgccgtttacggcgcgtggtactttattaccgcgcagaacgtggaatacgaatacagcgttaccaacagcaacattacggtggataaggtcatcgccaagcgcaagagaaagcgtatcgtcagctttgatattaaaaagattgaggaaatgggaaaatttgacgataaagattacgaaaaacgcaagtatgacaagctgatgtttgcgtccgcctccgattttggcgcagacgtttatgccgctgtattttttattgaaaaatacgggaactgcctgctgctcttttccccaaatgaaaaggtgctggaggctatgcgcccttatttaaagagggacatcgccgtcaatctttttattaaaaaataaggcggaaggaaggcaaattcacctgctgtttcgcttttatcggtaatggtgggggaacaaagcgttctcccatttttattttataacagggagtggtaagcatgaaaattctgtctgtagcgcaaatgcgggctttagagcgcgccgcagaacaggaaggcgcaacaatgattgagctgatgaaaatggcgggcgcctccgccgcccagctgatgatggaccggatgggcgtcaaagcggacgatacggtagccgtgctctgcggcaaagggcgtaacggcggcgatggttttatctcggcggcgtatctcaggcagcggggggtaaacagctccattattttaatggacggcgagcccaggagcgcggacgcaagagccgcattgaaggccgctggtgaaattggcgtcacgacctggcgctactgggaatctcagcgccttgccgaccagaaaatcaggcaatcgaaatttattatcgacgcgctctacgggattggctttaaagacggctttttagaccatatggcggcgtttatagaaaaaatcaacgaggaaaaagccgggcgtattatgtctatcgacctgcccagcggcgtgcagggagatacaggccgcgtcatcaacggcgcggtaaaagcaagccttacggtttcgtttacgacgctcaagccagcgcacgtgctttttcccgcaatggattattgtggggaaacggccgttgccgatattgggattccgcccatgttgatggcggaaagcccttatctgtatgaaacccccgaaaaagaggacgtcaggcgggttcttccaaagctttccgtttctgaaaacaaggggggccgcggccagctccttaccatctgcggcagcagcgggatggcaggcgcctgcgccatgagcgcgaaggccgcgctgcgctgcggcgtcgggctgctgaaaatcgctgcggccgactctatttatcccattgtctccgcacagctcaatgaaccggtttttttgccggtccggcaggcggcgggcgggacaattgaccgtgtctgcataccatacctgttgtcccaggcggaaaaggcaagctccattttgattggctgcgggcttggaggcggagaggatatcaggcttttggtagaaagctttctgcgcgaaagcaaagcgcctatggtcatcgatgccgatggcataaacgctgtagcgcagcatatagatatattaaaagaagcgaatgcgcccgttatcctgaccccgcacccaggggaggcggcaaggctgctcggcgcccaggtgcgcgacatacagaataaccggatagagtttgctcaaaagcttgcgagcggttacggcgttgttgcggtgcttaagggggctaaaacggtcattgcccacccaggagggaaaacattcgttaacaccagcgggaatgccggtatggcgcgcggaggcagcggggacgtattagcaggaatgattgcttctttcctcgcgcagggggcgcaggcgtttgacgcggctgtcgcgggcgtatacctgcacgggcttgccggagaccggtgcgcgcaggcgcttgggaaaatttccatgcttccgaccgatttaatcagtgagcttcccgctttaataaaagaattttcaaatgaataatgctcttgcttggagggctgggaaattgtaaaatactatttgtataaacgattaaattatatacaggtggtgttttatgcgccgttcgttttttttgatacttgctgtcgctgttattgcaattttgtttaccgcctgttcacagggcgccgcacagccggcggagcctgttacggatttttccgcggaggctcaggtagatacggcggggacagagctctcctgcgaggtcagccatacgaaggaaggcgtgtctgccgtgacggtaacaaagccagacggactcaaggggctgtgctttaaatggctcggcggggcgtattcaatcgaatacaataagctgttttgtcaaacaacctccgactaccttccgcagcaatccttcgcccgcgctatcgtcaacgtattgaatacctgcacgtcgcctgaaagcctgtctttagccgaaaataaagataatcagtgtgtctatacgggaagctgcgattccggggattttaaggtgacgtgcgataataagaccggcctgatacaaataatagaaattgataatttgtcgctgaaagtggaatttgtaaatcataagcagtatgattaatttaaacgggcggagagcaggtatatgcgtccgcccgtttaaaatccaacttccggtcacagtaaaatggagaatacgaataaacgcggtttttccaattttatttgtttgcaagaagatgagcgtttgaatagcgcaaaatatttaaaatttctatatttgtcaacagcttagagtgattgatgaaaaaaatttgcattggaataaatgataaattatataaatcactaaattaattatatatgatttaaataaaaaatttcttattttattgcttttgattaagcatgttgttttactgatgtgaaatattttcaactatattatgcaacttgtaaaaatttttaattattttgcataatggggttgacttttaaaaacagtgtggtaaaatatagtcgtaatgaaggttacctttcaggtaacttaaatctttcgaaagtatcattacaaaaaggcgttctgaactttttttttcatttttttgtttttgttcagacgtctagatacggggaattatttgttcctaggagaaggagctgctggtgggcggctcctttttcctttttaaaaaagcatacaaataaaacaggccgccgggattaatcccggcggcctgttttatttgtattggctgttcgccttatttttttgaaccgtcataggggttttcctgcttgttttcgtcattttgtattggcggttgtcctgtctggggagtgcaggaaggctggaaagcgccgtcctgccggggtatgccggcattgtgcggataatagtactgccttccatccgggccggttcgtatgtcgaagccctgcactgtggctatatttttgttgcttttttttacggctaaaacaacgattaatacaattattgctgcgaaaactaaaaaaccaatgatagacgccacaataattgcaaagccaaaggaaccgaccgtcccaaccgctttatcgaattcatcaggatggttttgtacatattcgccccaattattgtcgtaatccgggtcgtcccagaactcgttataataatagacggtatcatccaccatctgcttcaaggtatcccgcagctcgccggtcaccttacccttttcagcagtcaggataaaccggtattctttgccttctgtaatggtatagtaaacgacgccctgcttattgccgtctcctccgcccttaaaatcgagtacaatatactgcgtttcattataataataaaaatcataatcgctgtatgtatatccgtcgtcaccgcctttgtattctccctccgctatggctttgcccatgacttgcaggagagaatccgtcaggttggtcaggtcatagatttgctgagtatccctgttattctgaaaaaacaaatcaatcgtacctttaccgggataagctgtttcaaagataatatcgttctcctgaaaatatgtcaggagcttttcctttgttgtattgcgtgctttaaggttttcgtcgtccttttccacgtcccacgtaaagctcatccagttgtccggcgcctttacagaaatatcatagtcgtccagcatatattccgtaacaccgccggaatagtcggtaagcgcagacacagccgtcgtgcagattatggccaataaaaaaaccgcaataaaaaatgaacctgcttttttcattttctccactccttttcttaaccgcaatataacacataattcgggagtctgcaacaaaatatggcttcccttacaaaaaagtaagacatgtactgcatgctttatgccgctgtacgccggcggactgtaacctgtccgcaaggaggggcatataatataccgtaggatatgagaaaaataagaaaggagaattttgtcttgaacgacgatatttttacaatgaaaacaatggaatatggtatttcaccgcttccaagcgaccctgttccggcaatggcgtatgtgccgttccagaacagcgataaaatgtattctgccgagcaaggtatcgtgatgggaacgatgttcccggtactcaataaaccctttacgggctgtggaggtaggagagcatgacggaaagagaacttttaatgaggaaaattgctaccaacgactttgcggttgttgagcttcatttatatctggatacacatccgaatgataaacaaatggcggaaaggctcgaggaatttgccgcaaagagcgccgcgctgagaagagaatacgaacagaaatacggaccgctgacgccaggagaccagggcggaaaccgctgggcatggattgcaaatccatggccgtgggacagagcagaggaggagaactgttaaatgtgggtttatgaaaagaaattacagtatccggtcaatatcaaacgtaccaaccccaagcttgctaaaattattatctcgcagtacggcggtcctgacggcgagctagccgcgtctctgcgctatctcagccaacgcttcagcatgccttatccggaattaaaggcaatcttgaccgatattggcacggaagaactggcgcatcttgaaatgattggcgcaattgtttaccagctcacccgtgaccttacgccggaagaaatccagaaatcgggctttgactcttattttgtagaccatacaacgggtatttaccctgcgtcagcggcaggcgtgccgttcacagccgcctacattcagtcgaagggcgacacgattaccgaccttcatgaagatatggccgcggaacagaaagcacggacgacctatgacaacatcctgcgcttctgcgatgaccccgacgttatcgacccgattaagttcctgcgcgcacgcgaggtcgtgcattaccagcgcttcggcgaacataatccacacaatggtaactccatgcccgaaccatccccgggacagttttttgggggctgcatctgttttacatattcgagtttttttcaacgataccgcaaagcgtttttttatccacacacgaataaagcttcccgtcccattttatgctgggaccgttcaggcagtttttcatacatccggttacttgaaatgaaaacccgccttttaaactaacacctccattttttacacggtaattctcttcaacaaaacaacgcagttcccggcagccgcgtaatgcgcaccgttctcctccgcatatctccaaccggtggggcgcctcttccgtcctcaggctgggatagcgctttatgatggctgtcaaaaatgtttttttaagcttaagcccggcagagatttcatccagcgacacgtctggaataaccccgccgctttccttctgcacctcacgcaatagccctacaagcgcctgctgattctgctgtggattctggctgcggcaatattcgattgcatcctgcaagttccagctgtgttccatttgaaacctcccataccgtctctcgattttatatttattttatccggatactggtcatttatcagctggctggtaaagcgcttgtaaccttctattgtttggattttcaattcgtgattcaattgcgttcagaggaggatgtaatgttcatcacaagcgtatgaatttatgaaagctccagctcttccagtgcctggtttgtaatacgaatcacttgccgcgggctcaaatccatttgctctgccgcctgttccacactcaatgcgtccatgtatcgaaaaagcatcgcctttttctgtttttcatctttgagctttaaaattgccgagcgtatttcttgttccagccttctttcgtctgaatcgtccgggcggcgtgtcctgttttttttgaatcggagcaatatctcctttttttcatatacgttcatgtttttctcctttattttcgggatagctatccttatcaagctttttctctgcctgcggtaattacggccaatgttacaacgagcgcaatacaaggacaaaccaaccgccagccaatccaaagcatgtgaaacgccttccttccgcttcggtatggatagaagcaaaaaaattcgggaaatactatacaggaggtgattgtatgtcatatgtcgcgcctgagatgaaaagccgttttgaaacgctttccatcgacttgaaaaatgaaatactaaaaagagacgtccgcatttgtacgcttggcgatttgattaaggtgttagaggaaatcgcatctgagggctgagcctgaacaagctcaaaagtttagtttataggtttcctttatcgcattgcgtttttcacgcggcagtttcctgatacggcgcacgctgtttttctgagctgatcggaggttttccattgttatgtaaaaccggcagccttcacagtttttgtcaacgagcgcttcgcaggtagttccccggtccatcgcgcacagctcccgcggctgctcttcatagcagtcgcagatatgctccgcacaaacggcgtccctgtaaaattcagactgcgtgcatacgcagacaaggcttttatccgtatattttgcaatacaataattacatgtgctgcacaaaccttcgccctcctttccacttctgcgcccgccttatgcgggtgctctttttttgcataaagcaagacaagattacccctgccgtcaaaaagagaaaagtagcacaaagcaaaaagaaaagaaagccggttaatacgcggagataataaagtacggcggcgcaaaccgcaatatcaatcagaaaaaagtaagaaaataccttgttctccgcaatccaataatatatgcctcccaaaaacagtcccgctgatttcattttactccccctgacttatcttctgtgtttttcagccatttttccgcattttttaagatacgccgggcagcggcgccgttatcttttgcagaaacattcagcggctttttcattttcatccaaagagaaccatagttttcccccgcacggaagagaggaaaccctgccggtcaaaacgccctgtgttttttcataaataccgcttcaggcatatttccgcctgagaccgtccatgaaagtgaagtccgttttattgtgcagtaaaaatggtatgatgaaaactaccgagccatccggttgccgcaaccaaccttgtgacatctctttatgagtttattataccaactctttttgagtttgtcaactcgtttagaggttattttgaaatatttaaactcaatttgagcttaaaaaatatggaggtatcctacatggacaaaattataatacgcatgcttcccttgccaggcaaggtcaaaggaattaccgtgcttgatgagaattgcgattataacgtctatatcaacagcgtacatgcgcccgatatacagaagcaagccgtggagcatgagcttcgccacatccaaaaggagcatttttttacctgcggctccgttgcggagaatgagtacgaagcggaatccagcctgctgaacataaaagaggaagcgttggggttataagtacattttttaaaccggagacaaatattttcacccttatgtgctataatgattccagtcatggctaagcataaaaagtcatgagaaataattttattttccctataataaagccatacggagggagagcggcaatggattggattacaggcattcaaagagcaattgattatgtggaagcgcatcttacggaaccgattgattacgaggaggttgcgaagcgcgcatattcctcgagcttccatttccaacggattttcagcattatgtgcggattcacgctgggcgaatatatccgcgcaagacgcttgtcgcttgcaggaagcgcgcttgcaggcggtgagggaaaggtcatcgatattgctatgaagtacggctacgagacgccggagagctttagcagggcgtttacccggttccacggaatttccccgtctaaagccaaagcaaacggagctgccttaaaatcctattcccgtctttccgtaaaactaattttaagcggaggaaatgcaatggattaccggattgaaaaaaaggacccatttaaacttatcatgaaaaagaaaaagatggcctgcacaaacgaactgccgtttgctgagatttccgcattttggcagcagtgtatagaggacggcacaatagaagcgctgtgcaggtatatccctgaagaaaacctgttcggcgactgtattgtaggcgcaagcttcggaaatgatgcggcagacgcagactttccgtatgcaattggggctatatacaacggcgcgcctgtgacagaaaaaggcctggtggtcgaggagattccggcccatacctatgtggtgttcccatgcagagggaaaatgccggaagcgattgaaacgctgtatcagcggataatcagcgaattctttcccacgagtgaataccagccctgcggcgggaccgattttgaagcttatccttcagcggatgtatcgtcgccggattatacctgcgaaatttgggtcgcggttgaaaagaaaaaatgcacggcgaattaaatgcataaaattggcgaaaacgcagcggagagcgggaggtttaacctcccgctctccgttttcatgctccgaaacagatagtggatttatttattgtaaattttttgtgaaacagctttactgccaggatttggatagacatccgccagcctgtatgttagaatgagaaaaagcgaccgaaaggggaatgattgtggacatcacaagacaaaaggaaacgattacaattaaaacaggcagcaggctcgacgccaacacggcgccggagcttgcggaccagattgcgacgatgcagtttgaaaaactagttgtcgatatggccgataccgcttatgtatcgagcgcggggctgcgcgctttaatgattggaaaaaagactgccgacgcgcagggcgcggcacttgaaatcgtacacgtccagcctgcggttgaagaaatatttgaaatgagcggttttaaaaagtttcttaccatacattaagcgttctgttacggcagttagctattcttggtatcgtaacagaagcatcgtaatatcgtccgactggcttgcgtttccggtaaagcgcctaagctcgtttttaaacagctccatttgctccgccagcggcaggcgtttgtcaatctcgctatagcgctgttccagccgttcgttgccaaaaaattcaccgctttcattttccgcttcatttactccgtcggtgtataaaaaaagctcaaacgggccgctggccgggacgcggtgcagggtgtagtccataccgggtatcatcccaaggaatagctccggctccgacttcagccaccggtcccttttcccgtccgatatcatcggatagttgtggccggcgtttgaaaactcgaaggcctttttctttgtatcgagcacgccgatgaacatggtaacaaacatctgtgcgctgttgttgtcgcacaggatattattgatagcggcaagcatttgattcgggggcaattcgcggaaggtcttgacgagcatgctcgcttctgccatgaacatcgcggcggaaatccccttgccggaaacgtcggcaacgcacacgagaaaccggtcgtccgttacttggaaaaagtcgtagaaatcccctccgacctcctgcgccgtatggatataggcttccacctgccacggcgtctcttttttccaggggtcgggcaatatgcccatctggatttcatgggcgaccgaaaggatggctttgttgcgttcctcctttttggcctgctcctgaatggttttaacatattgaataatatcgtcagtcatcttggataccgattcgccgagcgtctggatttcgttattcagttttgggagccggggcttttcgctttccagcttttcagccacaaagcgctccgcgtacccggcaatttccttgattggagcggtaacatgccgttccgtccagcgcagcacaatataaagcgcgagtaaaaagacaacgcctcctacaaagctgtgttcaaatatcagcagccacatgtccgaaaaatagccgctgtccgcgccgtgcggatagtttcctgatattaaaaaatacattgccatcgagtaaacgaggatttctataaacgaaaaagaaagaaacccgattaaaagctggctttgcagccctctctgcggtacatagcgagccggcgccgatgaaatacgccgcttgctgcgccgcaggggaagaacggcaagcgccgcgattgccgcaagcattacgccgcaaaggacatggagcgccgtacggtcctgccctaaatagctggacagcaggtaggtagccagttccaggagaaggataacggcgcataaaaaatagtccgccgtatattttttatggtcgtatgcatactggtaaaccttttgcggcacataaggccgtatgccgaaatattcggtaagaagcagaaagaaaattgtcccgccaaatacggaaaagcagatgttgcacagtacggtcgtccttaaaaaactattgtaggtgaacaggccgagaaattcaccgctcgcgccgattaccgacatggaggtaacaaccgaaaaggccgtaatcaacaggtacttgagcagcgaatcggcgctgtacagataacagagcttatgcctgttcagcggaatcagcgtatgccacagcttatacggcaggaacgcaaaaaggaaattgccgaccagcccgaacagggaggccgcgttcagggtcccgaacacatcggcaataaggttcccgacgccgcatccaacggctcccgccggccccatcaacagcccggccatgacagggaagatggcggaaatgcgaaaatccgcgaagccttccagcagctggatttgcttaaagggaacaagcagcgcaacgtaaattcccattgaaaccaaaaaataaagcaggtgccgttttacatttattctggttaccgtcatagcgcgcgttcctccgtgtgtcccgtattgttgagcgttttacggaaggtcaggatatttttttcatcttgccgcttatagcaaaggtcttccatactgctattgacaagatggattcccaatccgcccggaaccaggcttgcggcctgttttttgacatccctgctttctgaataggcaaccgggtcgaacgcggcgccgctgtcctcgatgcgcacggttatctcagcagtatcggcggatgtttgcgcgcttttcagttcaatcgccgccgggcccccgctttcgccgtacgcataggaagcaatgttgatgaatatctcttcaatcgcaatcagcaaggtaatcgtctgtctctcattacagccggattttctcaggaactcctcgcagctggaggaaagcgccggccagttttcccgtttagcaggcagggtaattaacatatacaagcccccttacaaaaaaagtataccataagcggcagccgattcctataggattcttgggatatttttactccgccgccctcaagataaaattctggcccgttaggatttccgggcaaacgaaaagttcaggaggaaacaggatgaaaacgtttgtacagcagtttcaggatattgtaaaaagcaatggcgaaaggacggcgctcgtctatcaaaacgagcgggtgacttaccgtcagctcgacgagctgagcggacgcatcgcggcaaggcttcttgagcgtggagcggaaaaggaaaagatttatcccatcgtactggagagaggcatcgactatatcgcgtcggaaatcggcattttaaaggcgggcgccgcgttttccccgctgtcggtggaatatccgaaggacagggtggactatattcaaaaagactgcgcgtgcgattttttgattgacgcggcatttatgaaagaagcaaggcaatgccagccgcttacaaatctgccggaggtatcctggaacgacgcggcgatggtcatttacacctccggctcgaccggaaacccaaaggggattgtccacgagcatttcagctttaccagggcgataatccgccagcttccagtaggctgtaagcctgacggggtggaaatgagcgtaacgccgtttaattttgcgatttccgtagcggacatcttcgtcccgctttgggtaggcgcgccgattcatatcctgtccgagcaggaccgcaaggatatttataccgttgatgggtatatcgatgcccatggtatcaccgcttccgtcatcagcccgcagctcttaaaacgcctgccggacaggaaaagcacactgacaaatatttgctgcggcggcgaacgcatcagcaatatttataaagaataccagaccatttataacagctacggcctgagcgaaaccttgagtatcgccatcgcctttgcgctcgacaagccctatgacaacacgcctatcggcaagccgctcgaggactttaccgtttacctgctcgacgaggaaggcaggcaggtaaaggaaggggaagagggtgaaatatgcatcgcggggccgcttgcgcgcggctatatcaacctgcccgggcagacggcaaaaacctttgtggaaaatccatacgcgtcaggcgggcttgaccggcgcatgctccatacgaacgacgtcggcaaacgcctgcccgacgggaacatcctgtatgtcaaccggaaggactggatggtcaaggtcaacggccagcgcgtcgagatgggcgaggtcgagattcagctcgggaaaatcgacgggatagaaacggctgtagtcaaaagctttgaggacgataacggccagacctacctgtgcggctattacctgtgcggcaggcccgtcgcggaggacgaaatccgcgaaaagcttgcaaaaaaattccccggctatatgattccgcgttttctggtccaggtagataaattcccgctcaacgcaaacggcaagctcgaccgcaaggcgctcgcgccgccggaggcctcgcgttttaaaaaggaatatgccgcgccggaaaatgaggttcaggagcaaatctgcaaggggtttgaaaaggtgctcggcctttctcatatcggtatcagggacgatttcttttctatcggcggcgactccatcaaggtcgtcatcctccaggaggaattaagcgggttaaacctttcctcaagcgcaatctttgaaggcaggacgccggaaaaaatcgcgctgtccgtttctgcgcagggcggggaagaaaaccgctatgcgggtatggatacgcgcagggacgcatacccgatgaccgacagccagctcggtatttaccttgaatgtatgcgcgagccggaaagcctgatgtacaacaacctggcaagcttcctgttcccgcgggatatggggcttgacccatataagctcagggacgcgctgacggctgttatagaaggcttcccgtttatgaaaatacatgtggaggaacaaaacggcgttccctgcatcatcccgaacgaaacgctgacatatgaaataccggtaaggcgggttgacagtacagaacccacagctctcgcgaaatcctttttcaggccgttttccctggaggccggaccgatgttccgctttgaaatcgacatactgaaaaacggggacgttttgctgctcggcgatatgcaccatattattacggacggcacctccaccgcgctgttcttcagcaggatggctatggcttatgagggcgcagcgcccgagccggagctggtcgactccttcatgctttccaattatgagctgggcttaaaggacacgcgggaatataaggagagcagggaattctttgacagcctactggccggggtagaggcggattcaaacctgctgccggacgaacccttccagacaggtggggaaaagggctgtagtgtggagcttttaagcctgcgcggccaccttcccatcgccctgctgcgcgaacaggtaaagcggtacggcataacggaaagcacgctgtttttaggcgcgttttcctatgcgcttgcaaagcaaaacgggcaggatgaggtattgttctgcacggtagacaacggcaggcatacgcctgatttacgcggcaccatgggcatgctcgtaaggacgctcccgttttatgcgcgtatcgacgaagaaaaggaggcaaaacgtttccttcaggaaacgcaggaccagctgttccaatgcatcaagcacgacagctgctcctttgtcgagcttgcaagtgactatggggtcaagtcggatatcattttcgtctatcagggcgacacgttgaacggcattacgctcggcggaaggtttgtccccatgcaaatccataaaatgggcgacagcatggcaaacctttcgctcgacgtactcaaacgggacgacgattacacgctttcgtttgaataccgcagcgacctttacacaccgcggacaatccagcagtttgcaaagctcctggtttccgcggttaaagggttccttgcgggcggactgcttaaagatattccgttgtgcggcgaagacgacctggcggcctacaaaagcttcaatgaaaacacggttgcggtcgaccgcggccttacgcttgtcgatttgttcagaaaacaggcggcggaaacgccagaaagaaacgctgtcgtttaccgtgataaaacccttacctaccgccgtctggacgagctttccgaaaagctcgcgtacctgcttgcaaaagagggcgtcgggccggaggtgcccgtcggcctcatggtcaggcgcagcgaaatctttccggtctgttcgttcggtatacagaaggcgggcggtgcgtgccagccgctcgactcaaattacccacaggaacggctgcaatatatgctcgaggattccggcgctcctgtcgtcgtaatggatgaagagcttcgggagctgctgcccggatataagggcagggtgatttatacaaaagatatcgaaatggctgtgcccgatgctaccgtccggctccagccgccaaaagcggagaacctttttgcgctgctttatacctccggctcgaccggcaagccgaagggctgcatgatagagcacaggaatatcgtaaatttctgcctgtccttccaaaaaaagtttggtatcacctgcgaggaccgcgcgaccgcgtacggcagcttcggcttcgacgcgtccatgcaggacttatatccatacctcacgaagggcgcgtgcgtatatattgtgcccgaggaaacaaggctcgacctgccggggctccatgagcttgtaacagaaaacaaaatcaccatgatggactgtaccacccagcttgggcgccagtacgtctgtgcttacccggacagcccgacgcttagggggatgagcgtcggcggggaaaagctcgtaccctgcacgccgcctggttatccgttttacaatacatacggcccaaccgagtgtaccatttatgtcaccgatttcctgattgaccgcgattatgcttccgtccccatcggcaagccgtttggcaactgcgatgtttatatcgtagacaaataccgcaggctgctgcccccgggcgttccaggcgagctgtgcattgcgggctgtcccgtcacacgcggatacctcaaccgccctgacctgacggaagaaaaatatatagataacccgtttaacagcacgcccgggtacgagaaaatatatctgaccggcgacgtgtgccgttacctctatgacggcaatatccagtttgtcggcaggagggacgaacaggtgaaaatccgcggattccgcattgagctgacggaaatcgagcgccgcatccgcgcgtttgacggaataaccgacgcatgcgtcgttgcgcgcgacctcccggcgggcggaaaagcggtcgtagcttatgtcgtgtcggataatccggtcgatatccccgcgctcaacgcctttatcgcgcaggagctgccgcgttatatggtgccgtcagtcacggcacggattgataaaatcccgctcaacccaaacggaaaggtggataagcgccgcctgcctgagcctgaaatgggggcaaagaaaagcttaaatactgcccgcccgctcaaccgtttggagcaagagcttaaaaatatggccgccgaaattacaggccagagcgaattcgacatggaagcaagcctgatagccgccgggctttcctccctttccgccatgatgcttgcctcccgtgtgtatgaacgctttggctgccgtctcaatgtagctaagctgctggaagaagaatcctccatgctcgatgtggaaaacacggtgctggatgggctgcttgcgcgggagcaaaagaaaggcgggccagaagaacgtccgcagcaggggcagccggcggagctgccgctttcctcggcacagctcggcgtattctacgactgcatgaagcggcctaacgcgatgatttacaatatcccgatgatgtttaccttctcaaagcagacggatgcgcagcggctcgcgcgggctgcgcgggcggtaatcggggcgcaccctgtcctgacggcgcatcttatcgaaaaagaagaaaccgtcgtacaggtgctctcaggggcagagccctctgaacctgcggttttacaaatggcgggggacgggcttgcggaagaaaagaaaagctttgcccgcccgtttgatttgtttgaaggcccgctgtaccggatggaaatcgtaaaaacgccggagcgcacggcactgctgatggatacccaccatattgtgttcgacgggctttccatgtccgtatttttagaagagctgaggcgcgcctatgaaacgggaaagccggcgggggaaagcgccacgttcttcgacgcggcgcgtgaggagaataaaatcctgctcagcccgcagggaaaagaagcggaggattattacgacaagctgtttgaacgctttgaaaacgcaagtgacattcccggcgacctgcagggcaaagaggaggacggcacgctcggcgaatgcgtaagcgtgctcggcggggaagaaatcgacgatttctgccgcgcaaactccgtaacgcccgccgcgctgttcctttcgggaacgttctacgcggtgtcccgctatactgcggacaggaacgtctatatttccatgatttgcagcggcagggaaaacggcatgtatcaggatgccttcggcatgtttgtcaaaacgctgcccctttattcgcaggttacgcccggtacggacgcggtgtcctttataaaaagcgcgggcaaggcaatgcgcagcgcaatcgagcacagcgcgtatccgtttgtcaagcgttcgggccagtacgggtatgcaccccaaatcaattacgcctgccaattgggagtggacgcggcggtaacgctcgagggggagccgataagggaagaggtacttacgaaccccctgccgaaattccatatttccatccatattgaatcgaaagacggcgcgcctgccgtctgcgtgcagtataacgacgcgctgtacagccgcgcgtatatgcagcagttcgcagacgcggttgcgcaggccgtgcgtaacatggtaaaagcgccggagaacgatattgcggcggtttccctgttaagcaatgaacagcaggcgctcatcgaacgcttcggcatgggtgaaacggcctgcgtcccgcagcggctgctccataagctgatggaagcgcaggcgcgggaaaatccggaaaagacggcacttattgcctgcgacggagcgtttagctatgctcagttcaacaggctgtcagaccgcattgcgaacgccctggttcaaatgggcgttacagccggctgccgcgttgcgctgctgctcccgagaacaagccgcctgctgctgtccatgtacggcgtattgaaggcgggcgcggcgtttatcccgtgtgacccggaatatccgcaggaacggataagctatatcctttctgacagcgcggcaagctttatcctcacgacaaaggaaagggcggcgcagcttccccgggaccgggcaatcgatgtggaaacgctgcttaccggcaaggatgcccccgtacccgaaattcccctgcagccggacgacctggcatatttaatttatacctccggctcgactggaaggccgaagggcgtcatgctaacgcacggcggcataaccaattatgtttacggccatcccgccaatatccatatcagcgcgctccggcaggacgcgcacaccatggtgtccgtcacgacagcgtcgttcgatatgtcgcttaaagagacggttgcaatcctgagcagcggcctgacgctcgcgcttgcaagcgaacagcaggcgcagaacccggcgcagcttgccggactgtttaaacaggtcaacggcgacgcgttcaatgcgacgccctcgcgtatggaacagtatctggagctacccgcgttccgcgacgcgctggcaggctgcagggttgtcatgtgcggcggtgaaaagtattcccccaagctgctcgcgcggcttaaagatattacgggcgcgcgcattttcaacacctacggcccgacggaaatcaccgtatcctgcaacgcctgcgagcttacgggccgtacggaggtgacagtcggcaggccgcttctcaacgtgcgtgaattcatcgtcgactgtgacggcaaccccctgccctggggtgttaccggcgagctgctcgtcggcggcgccggtgtggcaaggggctactggaacaacgaggagctgacaagaaagcattttacagaataccgcggcatgcgcgtataccgcaccggcgattatgcgaaatggacgcagggcggggatgtcgccatacttgggcgcaccgataaccaggtgaagctcagggggctgcgaatcgagctgggcgaaattgaaaagtgtatgctcgaagacagccgcgtgcggcaggcggtcgtaatgatacgcgaaatcaacggtacggagcacctgtgcgcatactttacagcggatggagccatttccccacaggaaatgaaggaaacgctcggcaaagcgctgacggcctacatggtgccgaccgcttacctccagcttgaaaggctgccggtgacgcctaacggcaaggtcgacgtcaaaaagcttcccgctcccgttccggcgcatggcggggaatttacagcgcctgtaaacgatactgaaaaagcattgtgcgaaatctttgcgcagacgctccagctcggcaaaataggcgcgacagacagctttttcgatttaggcggaacgtcccttaccgtaacaaacgtgcttatcaaggcaaacgagaggggctttgccgtctcttacggagatgtgtttacctgcaaaacgcccagagcgcttgcgcagaagctgctcggcggcaaggatgagcagggcggcgaaatgcggtatgactacagccgcattgataaaatcttggaagaaaacacccttgaggcgcttaaaaatggagcgcggggtacgcttggcaacctgcttttaaccggcgcgacgggatttttaggcatccacattctgcatgaatttcttgaaaaggaacgtggagaggtcacctgcctgctgcgcgggcttggaaaccgcacggcgaaaatgcgcctgcaggcaaagctgttctattattttgaagacaattacgaagagcaattcggtaagcgcatccatttggtagagggcgacgttacgcagaccggatggatggaggggctaaaaggcaaacccatccacaccgtcgtaaactgtgctgcgctcgttaagcatttttcaaatcaaacggatattgaggacgtaaacgccggcggcgcggaaaacctgcttgctttctgccggaagacgggcgctatgatggtccaggtatcgaccggcagcatagcgggcgaccgcgtagacggctatccctccagggaactgaagctcagcgagcaaaagctctatttcggccagaatatcgacaaccagtacgtccacagcaagtttatggcggagcgcctggtcctggaggcggcgctccagggcgtgcctgtaaaaattatgcgcgtcgggaaccttgccgcgagggaaagcgacggagagttccaattgaactttacaaccaatggctttatgggaaggctcaaggcgtatctcgtcatcggggcgttcccgtacagcgcaatgaacgcaatggtggaaatggcgcctgtggacagcacggcgcaggctatcctgatgctatgcaaaacgccggagcaatgccgcgtgttccatccgtataacaatcattatgtgccgctcggcgatatcatcctgcaaatgaggcgtatgggtatgaaaattgagcttgtagaggacgaagcctttgaagccgctctgcaaaaagcaaaggaagaccctgtaaaggcacgtgtgctcactacgctgctcgcctatgaaaacatggatgcgggcaaaaaaattgaaatgatagcaacagagaacgagcttacgacgcaggcgctttacaggctcggctttgaatggtctatgacctcgcgtacctatatgaacaggttcctcgaagcgctcgatgggcttggctttttcgatatggattcggcacaggagggacggcatgcttgaacgaaacaaccggctgctcagccgaaaatataaggaatatctttttccgacggttatcagcggcatgtctatcctgctcggctccattgtagacggtatcatcgtcggccagttcatcggccctgacgccatggccgcggtcaatgtaacagagcctgccgtgctctttttccaggcggtctttttcctgataggtatcggcggctccacgcttgtagctgtttcaaagggcgaacgcagggaaaggaaggcaaacgccgcctttacgctgggcgtattgtctatgctcgcaatctccttcgttacgctggtcctgggcagcgtgttcatagagccgcttgtgcgggtgctgtgcaacgacccaaagctttttgtacctgcgctcgaatacctgcaaattttgattttcggcgccccgtttatgattgccgtcccctgtatggtgtactttgtacgcgtagacggtatgccaaagctctccgcgcgcatcctgctgcttgcaaacgttgtgaaccttctgatggatttggtttatatcaacgtgctccatatgggcatccgcggcgcggcgctcgcgaccgtaaccgggtacgcggtcggttttgtcccggtgctttggtacctgttttcaaaaaaacgcacgctttcctttctcaaaatcaaaaaggaagacctgcgctgccttggcgaaattgcaaacagcggccttgcgtcgtttatcaacacctgcctgctgtttttaaaaacgctgttcctcaaccgtatcgtcatgagcacggcgggtactgacggcatgattgtcttttccgtatgcagcttttccctttcgttcgtctcaatgttcgtgtccggcggggcggaaacgatggtacccctgctcggtatgctgtacggggaaaaggacaggaagggtatggactttgttgtaaaaaggacattcctcgtggtcggcgcatgctccgccgtatcggttttcctgatggaggttttccccgtgcagattctcggcctgtttaatataacgggagccgcgcagcttgcaatgggtgtgtccgccctgcgcatattcgccctgagcctcctgctgatggggatttcaatcacggtcatgtactacatgcagacaatccggcaaaaaaatatatccgtcatggtttctatcctgcgcggttttttgattacggttccgtgcgcatggcttttttcccagatgttcggtacatacggcatttggttttctttcctgacggcggaaatattgaccctggccgttaccctgattgcctgcaaatggaaagccgtgcgctcaaaaggaaaatataccggccttttactgcatgaaaaagcgccggagcgggaatttacctatgatgtcacgattaagagcggcgtcaaaggagcggtagacgtttcagaggaattgattggcttttgccaaaagcacggcctggacggcacaacatcgagccttgtcgggctgatggctgaggaagcgtccgtcagtatcgcttcacagaacgagggcggcaggccggttgacgtcgatatcctgtgcaggctgcgtcccgacagtgtgattttaagcctgcgcgacgacggcaggccgttcgacgccatgctgcttgaaccggaggaagaagagcgctttggcaatatcagcgtcatgaacaaaatcgcggacgaggtgtcgtattcccgcacgctggggctcaacagcacgctggttatcctgtcaagagagggagagaaaatatgaagttttttatctataactttatgaaggcacgctgtgaggaggaaatcatccgcggcacagagctgattacacgcgaaacgaagcggtacgacagggaagaggatatgatggttttcctgcttgttcccgccacagccctttcggctgtttcaaaaaaagcggaccacaggtttgtcaaaattggtgcgcaggacatgtctccccttagattgggccaggtttcgggcgagacatcggcggaaatgctcaagcttaatggcgcggatatggcaatggcgggcgcgtacgaccgccgcctgtactgcggggacagcgacgagctttgcggtgaaaaactaacggatattataaaaagcggcttcaaatctttgcttggcgtgacagaaaccattggacgggaggacggctcgcgggcggacgcggcgcttcttcgccagcttgaatatggctgtaaggaaatccctgaatatgcgtattatcgctttggcgtggtttaccagccgcgcctgaaagaaaacgctgccattgatgtccgcaaaagatgcgcgtttatcaggaaagccctcgctgaaaccgttccgggcgcgccggagcccctgcctgtgttttatggcgggcctatgcgcggtcaggaagcggtggatatgctgacagaaggcgtgtgcgacggtatctttgctgacgacagaagctgggacacagagcagttcctgcgcgtagtcaaagctgtctgcggggaatgacggtaatcgtttatacaaaaccggcggcctgttttattggggctgccggttttcttcgccattttggaatgcttttgccaagccgcacataaaaatagacgggtggttaatttgatttatgacacatcgggctatcgtaaggaagtagaaacggtgtggatgcgtgaaaagcagatgattttggagcattatattccgcgccttacagataaagcggtggaaaaaaaagaaatagaagcaggcagtgagcttgtacaggtgtttcaaaggtatatgggaaaaaaggaaaaagcggacgcgtaacatgttgcgcgtctgttttttattgtaagggggaagcggatgaaagcggtttacgcgcgccagtcggtcgacagggcggacagtatttctgtggaaagccagatagagctttgtacctatgagctgaagggagacaaaaacttcagggttttctgtgacaggggctacagcggaaaaaaccttctccggccccagttccagcagcttttagacgaaatcaggcaagggcaaatcgagcaggtcatcgtctataagctcgaccggataagccgcagcgtactcgattttgcaaatctgatggagctgtttgaaaagcaccgcgtggagtttatctcctgcagtgaaaaattcgacacctcgacccctatggggcgcgcaatgctgagcgtttgtatcgtattcgcacagctcgagcgggagacgattgcgcagcgcgtgaccgacgcgttcctgtccagaagcgaaaagggctactatatgggcggaagggtgccgtatggctatcggctggaaaagaccgtaatgaatggaatccacaccggaaaatatataatctgtgaagaggaagcgatgcaaatacggctgatgtattcgatgtattccgacccacattgttcttatggcgatattctcaacacctttaacagccgggggcttttttgccgcggaaagccgtgggaccgcgccaggattgccgaccatttaaaaaaccccgtctatgtacgtgccgacggcgcggtctatgattttttcagcgaacagggcgcggtattatgcagcccgcgcggggattttgcagggacaaacggctgttatctctatacttaccagggaaaaggctctaaatatacgcggctcgaggggcgcaggctggtgctcgcgccgcatgaggggcttgttgattcccacacatggcttatctgcaagcgcaaaaccatgcgcaacaggcaaatccgtacggctgataaggtaattaacacctggctggcggggcttgtcaaatgcggcaggtgcggctatgcgctcacctttaaaaagtataagggaaaagacgcgcgttatctgttttgcagccataaaatgaacgcaagggcctgcgcaggagcggggacgctctatgcggatgaatttgaggagattattaaaaatgcgcttctccgaaaaatcgcggccttccgtacgctggtaattcaggataataaagaggcggacccgcgcacggaggagctccgccagcaaatcaccggcgtggaaaaagaaatagaaagccttatggaaaagctgccgggagcaggtgaggcgcttacgcgtcatatcgacgaaagcatcacagcgctggaacgaaaaaaaggagaagcgctttatgcgctcgcgcagcgtaaaaggcaaaagacagatgacgcgcctgcattcccggcgcaggcgtgctgcgataaatggaacaggcttggcatgcgcgagaagcagcgggcggcttgggcgctgattgaacggattgaggcgacaaacgaatacatcaggattttttggaaattatagcgagttcttttttgtttcctgtagttaccagaagccagcttcggcgaaggcttgcgcatcacaaccgataagctcgacagcaaaaacttctacgcgtttaacccgtcctttgacaaatgcgggaaaagctgcccgccggaaaagaagtaacaggcatcaggtaaccaaaaaaataaaagccccatcctctggatggggcataaatttattgcgggcaaaatttcaggttattttaaagaaaacctttttttgtaaatccaatttccggaaaaaatgaggataaaagagaatacgagcagcggcaggtagggaagcagcagcgtctcaaagcgcccgattctcccgttgcataccatgttgataaacctaagcgcttctacattggaatagatgcagaaaatctcataaaacacattgattaaaaacggaattgcgattgtgcggcataaaagcatcaggaaaaaggtgcttcccgcaaaaacaaacgattggataaaaaacaggagaaagtccatccagaaattctcaaaaaatattgcataaacaaaaataagcactacagcgtgcaggatataccagaaaaaaatcaggaaaaaatcacccaacaggctgtttttgtatacgcggagcagctccctgccatctccctcggcatattctctcagcccgaaaacgacccaccacgtggccataaaaggaatataccgctgcatttccataaaggtaagctcaaacgctttcctactcaatccggaggaaaggtaatgtcccacgctgaaaaacggcaggagcagaaacaaaacggcgattggcacaaagtaaaggagcttcaggctttttaggttatagtaacaaagccgcagcaggctcatagctttttcagcgcgcataaaaaaccgtcctccaccgtaggcgtttgtttctcaccgggctgtttagaggaagacagcacacgcagcatagcgcgcccgttatcctctatcctgtccttgacaaagaagcttccggtaagctcgttttctctttgtgcttctaataaatacaccttgccctgggccagctgcgcaatctccgctcccgtaccgtttgccgcgagcctgcccgcgtccataatcaaaatcctgtcgcagaccgcctctacgtccgaaacgatatgtgtggagataacgaccgtacagctttccttgatgcgtgcaagcgtgtttttaaagcgcatgcgctcctcagggtcgagccccgcggtcggctcgtcaaagaggattagctccgggtttccaagcagcgcctgcgccacgccgattctccgtaccattccgccggacagggtggatatcctgtcgtgcaggcggtcggtaaggtttacctcctccacgcactgctcaatctgttccttttgcttttgcttctctatttttttaagcgtcgcgaaataagacatcatttcatacacggtaagctctttgaacataccgaatttctgcggcaggtagccgataaacccttcgggcttttcaattttgccgccgtcgggccggtacagcccgcagacgcagcgcagcagcgtcgtcttacccgcgccgttggggcccagcaggccaaacgcgccgcgcccgtctatctgcgcggaaaagccgtcgagcgcccttttccttttgaattttttggtacagttttcaattttcagcatcgttatactcctttaacagcattttagcgtattctggaatgcgcgtttgatctccagacattaaaaaaacctgattatcaaatattgctgcgggaccatattgcgcgaaattgataaactccgtcgtcgattggaatatcgtcatgctgtccaaatcgaggtggttttctatattttcttttttttctatctctgtgattttctgctgcagcttatttagaaattcattattaagcggttcatatccccagccacctatacttgatttatatatagtgtttcttccaaataattcttcctgtagattgccacccattaaggttagggcgcccgcctctccggcaaagcagtttttcctgccgcctgcgtccggcaggctgctgaaaatctgcctgctggcctctacctcaatgctgtactgcgaggaaaagccatttgaaaccttccggtagccttggtggccattactaatttgatggaaccccgccatggggtaatacggaaagcaccccggcagcaaaacagcctggtaattgctgtaaaggattgggctgctgcccttataagaaagtgtaaggcccgtaagcggcgcttgggaaacgaccgtcaggtaatcgtcctcccgcgtataagggagggcgttgccgctttggtcggcggcgcttaaaatctcgtacccgtggtagagcgtaaaagcatattctgttgtatcggcgggggagagcgccatgtccaccgttgcctccagctccctgccgattttgagcttcatgtcgtaggaagggatggtaaagccagccgccatgattttagaggcgtgctcccggtagtattcgttatcgttacgggtgatgctctgagggtaggggccgagcacgagctcgctcccgccgagggaatagccgtagaggttcacgcccgccagaattacggcgagcgccgtcacggcaaaccgcgtttttgttttttggggcaggatggagaaaattacgattgcaaggaataggcatatccagaacagcattaaattccagcgcagcgcttcgtttgacattccgtattgtatatcgactacccaggtcaggttcggcggcaggattttgctgaaaaaccatttggcgggccacaggttaaaaccgtaggagtcggtcgcaatgccggggagcatgtctgacacggggcttacaataaaaatagagagcgccatcagcgaataggcaggtacgcgcttgaacctgagcgcaaggcacatcccaagcaggtttgcaagcgtgctgagcaggaaaaaatttaggaagttaaccagcacgatatgaaggtaataatggagagcgtttacatctacgattgccgcgatcgcaaagttgaatatggtagcaatcaaaaaagcaagcaacatcagcagcgtcagcacggcgaacataccgccgtatgttttcagtcggccttttttgtgggcggacaggctttcctctatcccgcattgctttactttataaaaatattcataagaaaggtataggcccgcaataaaggcaagcaggctgcattcctgtgtactttgaaaataatttaaaacatcccagttcatggtaatcgtataacatctataagaaagataaaaaaataagcctacgattgccagaaacgccacaataaaaatatggcggtcccgtataaaaatctgcaggttctttttcagttgaagcaccgcgttcactcctttgttctgaaggctttagaacgccccgcataccgtattgggattgagcggacggcatacggggcgttcatgggctatgctttatttagttataggcatgaaccttgccgcttgcaacgcatccggtgcccagccagtaccaagagcacatatgcccccgccaactggcaacgccgcccaggtcgtaggttcctgttgcactgtcattctggcccgggtcacagaagaggtgataggcattttgccaacctttcccggggaatgcatagtcgtaatacaaatttaccccgtcgttggaagatgtgctggtccttaaatactcgacatttcctttgctgtagagtccaagtgttgtggagtaagcgtccgtttggttttttgccaaactccaggaagccgacaccgcccccgcgggcatgaccgcggtagaaaccagcagcacggctgcggcagccaccgcaaggatttttttgcttttcataatgattcctccttttagaatattttttttattttatgcgcgcataatgtaataatttttacacctaaattatacaatatctatttttaaacttcaatatatattaaaattttattagtaaaaattaatatataaattttgtaaaatataaacattgcgttcgtcattataaaataaaatatttattgtatgctcaaatatcgaaaaagaaagcattatagatacgatttctatttgtacgttttctacatcgaaatcaagataaatttattatgtttaacaaagttgtgtaaaagtagtttacgttttacaataaaacctctatgatactaatatagtgacaatttttcacatattgggattcaaataaacggagagaaatggaatgatatctatgaatacgctcccgttggaagcggaaacgagggttttaattgacaagacgctcgaaaacctgggctggagcttgtccggtccggaaaaaaacgtattttttgaacagccgaaaactcaggaagaacaaagccggcttggcggcaggcgcccggattatgtgctttacgcatccggcaaagaaagcaggccgcttatcgtaattgaggccaagaaaaaagggacgcgcattgaaagcgcgctgcagcagggcataagctatgccagaaagcttagggcgcctcttgtttttgcgaccgacggccttttctgccggtcataccatactgtgtttgaacgcgcgcccgtattaaacggcgaggagctggacagcttcccgcgcgaggggctggcgctgaaatacctggatacgcccgaggtcaacacgatttctgaaaaagtgcaggttgaccgcaaggaattgattaaaattttcgacgaggcaaacaatatgctgcgcggcgacggcctgcgcgcgggcatcgaacggttcggcgagtttgcaaatatcctgtttttaaagctcatcagcgaaaatgagaacgtcaaaaggcaaggcggtataccttccggctttgactgcacctgccactgggacgtcatacgggagatgcggcccgacgcgcgcatcgattacatcaataaggtcgtatatgaaaaattgaacgcgaggtaccgtaccaggatatttacgccgctaactattcgggatacgacaattctcagcgatattatggacaagctcgacccgttgacgctgaccgacgtggattccgacgtaaaaggcgacgcttttgagtattttttgaaggaatccaccgccgccaaaaacgatttgggcgaatatttcacgccgcgccacatcgtcaggactatggtgaaaattgtcaatcccaagataggcgaaaagatatatgaccccttctgcgggacaggcggctttttgatcgaaagctaccgccatatattcaatacgatgccgcgaaacgctaccacaatgaaaatgctcagggacaacacgatttacggcaatgaaattactaacacagcgcgtattacaaaaatgaatatgattctcgcgggcggagggcagggcaatatccatatgcgcgacagcctcgcttcgcccgtagatggtatttatgatattgtcctcgcgaatatgccctattctcagaaaacaaaatacggcagcctttacgacctgccttccaacaacggcgacagcatctgtgtacagcactgcatgaggtcggtaagcgccgcggcggaaaatggcaggctggctatcgttgtgccggaaggctttctgtttcgtaaggaccttgtcaaaacacgcgagcttttgcttcgtgaatttcaaatcaacagcataatttcccttccgcgcggcgtttttctgccatatacaggcgtaaaaacaaatattatttacgcgtcgcgcaaacaccgtgccggtattgggtataccccacgtgaatctttttggtattatgaagccaaaaacgacggctatacgctcgacaatcacagaaacaagctgcaggggcaaaacgacctggaccgctgcatggaattcaggaagcttgactccggccagaaagaggagatgcttgcggccggttttcaggaaattccgctgggccgcgtaaaagaaaacggcttcgttctcgttgggggcaggtacagcaaaatggaagcccctgtattatcgcagcgaaaagtcaggctgggggaaattctcgatatccattacggcaaacgcattacacgcagaaaagacagcggaacaagctacccggtatacggaggcggcggcccatccttccagacagacctgtataaccgggaaaatgagtttgtcatatcacgtttcggcgtttcggagcgctgcgtccgttttgtggaaggccggttttacctgctcgactcaggcttcacctttactgtaaaaccggagaccgcttcacaggtcagcaaagcgtatgttggaaggcttttgatggggcgccagcgcgaggtgttcgcctgcgcgcgcggacaggcgcagaaaaatatagatatggagcttttttacgggcttacaattcccctgccaagcctggaggaacaggaaaacgctgcgcgggagcttgaggaatatgataaaatcatctcatattcggcatgtacggtacagtcgtaccatccgcgccttttacttgcgaacggcacgcgcatgtgtacaatcggttcgctatgtaccggcgatatcagcgggggaaccccttccacaaagcacccggaatactggaacggggacatcccatggataacgagcgcggacatcgaagaggacggcaggattatagtaaaaaagtacgttacgcgccaggggctccagcattccgctacgcatatcatccccaagggggagattatcgtcgctacgcgcgtggggctcggcaaaattgcatacgtgccctacgatattgcaatcagccaagacctgcatggccttgtgctcgatacaaagcggattcttccgcagttttttgagcttgcatacctggggctcaggcaggaaattttcaggcatgcccgcggtacgacaattcgtgggattaccgtacaggagctaatggcgcttgaaattcccgtgccctccatggaagagcagatggtagctgtaacacaggcaaagcgtgagcgcgagctggtacatagcgcgcatgagctgtcggtgctttttaaaaacaaacgccaaaggcgtgtggaatccctgtatctgaaaaaatagcgcgctttcgcgctataaacaaaaaagcctccggattttttccggaggctttttgtaatttgaaatctatcagcttacgcccattattttctcgctatctttcacaagcttatcggtaagcttgtgcgcgtcctgcttatcgcttcctacagcggtaatataaagcttgattttcggctctgtcccgcttggacggacgataaccgaatggccgccttccagggaatatgcgataacattcgatttgggcagtgtgattttcgtttcctcgcctgttttgcagtccctggaaacgctttgcaggtaatcgtctgtttttacgaccgcaaagcccgcgatggctgcaggggcttggtaacgcagccctgtcatgatatgattcattttttcaaggccggcggcaccctcaaaaccaaaattgagcgttgtgttctggtaatagccgtattcctcatacagctcgtcgatgacgtttgcgagcgttttgccctgtttcctgtaatatgccgccatttcacagattagcatagacgcgaccaccgcgtccttatccctgacatacgtccccgcaaggtagccgtagctctcctcaaagccgaatacatagcggttttcctcatgcatctgttccagctcgagaatttgctcgccgatatatttaaagccggtcagaacattgcgcagctcgcagccgtacttttcgcagatacggttgattagtatacttgtaacgaccgtttttaccacaatcgggcgctgcggcagcgtaccctgcgccttgcggcaggaaaggatataattcgtcagcataatgcccgtctcgttgccggaaatcaagcggtagccggagccgtcctttacggctatgccaaccctgtcgctgtccgggtcggtcgcaagcagcaaatccggctgaaccttttcacagaggtcaagccccagctgcagcgcttccttgaattcagggtttggataagggcaggttgtaaagttgccgtccgggttttcctgctccttaacaacggtgacttcagaaacacccgtccttttaaggatttccctaacaagcttattacccgcgccgtttaaaggcgtgtagacgaccttcaggcccgcgtctttgcaaatgccgggattaatcgcctgcgcagacacgttttcaaggtatttttcatagaggccgtcttccatatattcaatcgagccctctgcggccgcctgctcaaaatcggctgttttcacaccgtcaaaacagtcggtcgcctggatttccgcatagacctcgcccgcggcaatgtcggtcatctggcagccgtccgcgccatagcatttatagccgttgtacgccgctgggttatggcttgccgtcaccataatgcccgcctggcatttcagttccctgacggcgaacgacagcacgggcgtcggctccagctccctggatagatacgcctttacgccgttggcggcaaggaccctggcggcctctttcgcaaacagtgtggattttattctggaatcatacgaaatcgcaaccgcggatgtatcgtattttttgttcaggtaatttgcgagcccctgtgtcgcgaggcggacattgtatatgttcatgcggttggttcccgcgccgattatgccgcgaagccctgcggttccaaactcaaggctgcggtaaaaccggtcgtaaatttcgtcgttgtttccttttattgattggagctcatcggtaaggtctttatcttcgaccgccttattaagccataattcataaagtttttttgtttccatgcttgggtcaccctttcaggataagatgggattcaaatttaataaaaaatacggatttaatataccacattttacagcggtttacaaattttgataataaaaacaagatgaaaaatacgggcgttttcggtaaagcataggcgttttttttcttatttataaatatatcccggcgaatacgcgtttttcttgtggataaaagacaataaataaaaaccggtgtggaaaaattaagaataaatgtgaaaaaattcacaaggaaacgaaatcttgagtttatgaagtttttgttccaaacctttaaatatttatttaagatggcaatttgtgcttgtgccgcgaagatttctattgtacaatagaaaaaactgtaatcatgcaaagacatacaaggaggaaataaagtggacgatacacagaaaaaagacggcctggaaacggggcgggacagcgaacaggaatttaccggcgatattccggcagaacagcaggcggagcagcctctggaggaaacacctttgccggataatgtcgcgccgctttccgatgagccccaggatgaagacagcgcatttcttgacaatccggcggacggctacgcttcccagttcggtgagctggatttggagcccggcgcggctgctgtcgtgacaaaaaagaaaagctttttaatgccgagcattattatcgcaattgtgattttgttcgtggcggcagcggcgggggccgcataccttgtgtttttccataacaccccggccggcacgtgggcgcccgcggacggcagcggtacgagctactatgtgttcgacaacaacgggacggtggagcttgtggccggcacggtgcggtataagggaacctacgccctgtctgatacggacggcagcaaaagaataaacctctatattccggtcggttattccgctatacagggcgatttcgactatacgctttccggcaacatttttacgggcaaaacgtttgaaatttcctccggcgagggagagccgctcaagcttgtttcctcctcgcttcccgaaaacacactgacgcccgccgaggacaggaagacggatgataaaatcattggaacttggaagctcaaggacagcaccaacaatgtaacctatacgattaaccaggacggtacgattatcctgcaatccgacagcatgcgcatcgacggcgtttataccattaaggacaaggcgcttgccattacgtacaatatggccggacaggaaagcacgatggaggaagaatactccttcgacggagaaacgctgattatcaacagtatgggctatgaaaaggcggattaagcggtacggctaaaatatgtagcttgaaaatcccgtaccctgttattttacgccgaggcagatatgtgtgtgcgtgtccgtgctttgacaagcgtgcgccggtgtgctagaataataaaaactgaatatcgtttgcagggggactcttcggagttgagaaggtaaaacctgacccttagaacctgttagttaatactatcgtagggagcagcatggatgattagacgatacctttacccttgtagtatggtatcgtctttttgttttgctccagaaaaagaaaggagctgtttgttatgaaaacctgcctggctatcgccggctcagactgcagcggcggcgccggaatacaggccgatttgaaggcgttcagcgcaaaccgcgcgtttggcatgagcgtgatagcgtctgtcgtcgcggaaaataccagccgtgtgctgtctgtctttgatttgccggtttcatgcgtggaaagccagatagacgcggtgtttgaggacataacggtggacgccgtgaaaattgggatgctgtcaaacgcgcagataatgcaggccgccgcgcggcggcttgagaagtaccgtccgccgtatatcgtccttgaccccgtcatgaccgcaaagggaggaagcccgctcatggagccgcaggcgctggctgtactcaaggaggagctggttccgctctgtgcgcttgtgacgcccaaccttccggaggcgcaggaaattacgggggacgctatccgttcgccgcgggacatgaagcgcgcggcggtaaaaatcaaggagctgggcgcttgcagcgtactcattaaaggcggccatctggagggagacgcgctggatatcctctatgatggggacgcgttttatgaattcagggaagagcgcgtcaaaacagagaacacgcacgggacgggctgtacgctgtcctccgcgattgccgcgaacctcgcaaacggcatgtctatgagggacgctgtggacaaggcgaagggctacgtcacacaggcaatccgtcatgccctgcccataggaaaggggcacgggcccacaaaccacttttacgagttctaccggatgaaaggatggataaaatgagaacctaccatacgcagatggaggccgcgaaaaaggggattgtcaccccggaaatggaagctgtcgcgaaaaaagagagcgtggacacgcagacagtaatggaacgcgtagcggccgggactgtcgcaattcccgctaatattgcgcataaaacgctgtcgccggaaggaatcgggcagggccttcggacaaaaatcaacgtaaacctcggcgtttccggcgactgcctcaattatgaaaccgaaatgaaaaaggtaagctgcgcgctctctttcggcgcggaggccatcatggacttgagcaactacggcaagacgaacaccttccggcgcgagcttatcgccatgtcgcccgcgatgataggcaccgtaccgatgtacgacgcaatcggttatttggagaaagacctctgcgacattacggcgcgggactttctggaggtcgtgcgcgcccacgcggaagagggcgtcgattttatgaccatacacgcgggaattaacagaagaacggtggaggctttccgcagggcgggcaggaggatgaacatcgtctcgcgcggcgggtcccttttgtttgcctggatggaaatgacgggcagcgaaaacccgttctttgaatattacgacgacgtgctcgaaatcctgcgcgaatacgacgtgacaataagccttggcgacgcgctgcgcccgggctgcctggccgacagctcagacgcgggacagctctgcgagctgattgagctgggttaccttacgaaacgcgcgtgggaaaaggatgtgcaggttatggtagaggggccgggccatatggcgatggacgaaatcgcggccaatatgaagctgcaaaaacgcctgtgccataacgcgccgttttatgtgcttggcccgctcgttacggacatcgcgccgggctacgaccatatcaccgcggctatcggcggcgcaatcgccgcggcaagcggggcggatttcctctgctacgtcacgcccgcggagcacctgcgccttcctgatttaaacgacgtaaaggaagggattgccgcaagcaaaatcgcggcgcacgcggcggatatcgccaagggcgtgccgcacgcgcgcgagcgcgacgaccgcatggcgcaggcccgccataagcttgactgggaagagatgttcggtattgcgctcgacggggaaaaggcgcgcgcctactttgagagcacgccgccgcaggacaggcatacctgttctatgtgcgggcggatgtgcgccgtacgtacgaccaaccggattttaaacggggagaaggtcacgttctgccccaaagaggacgaaaacaataaggaaaaggagtcagtaaaatgaaccaaatcacggaaaatgccgcccaattattagaaaacgtcagaaaaacagtcccgcttgtacataacataacaaactatgtcaccgtaaacgatgcggcaaacgccgtgcttgccattggcgcgtcgccgattatggcggacgatattgaagaggcggcggatattacagccatctcaaacgcccttgtactcaatatggggacgctcaataagcgaacggtcgaatccatgctcgcggcgggaaaacgcgcaaacgagctgggcgtgcccgtcgtattcgatccggtcggcgcgggcgcgtccgtatttcgcaacgaaacggcgcggaaaatcacggggcaggtaacgctttcggttatcaggggcaacctgtcggagctttcctttatcgcgggtctcggcgcttcgacaaaaggcgtggacagcgcacaggcggacgaaaagaacgacgccgtatcggttgcgaaagcagccgcgcagaagctccaatgcgttgccgcgctcacagggaaggttgatgtgattacagacggcacgcgtgtcattcaaattgaaaacggccatcccatgctttctaaggtcacgggtacaggctgtatggccaccgcgcttacgggcgcttatgcgggcgcgtgcggcggtgatttccttacagcggcggctgccggcgtgtgctctatgggaatcgcgggtgagcttgcgtatgaatcggcgggcgcaaaagggacaggcagcttccatattgcgattatggatgcgctgtcgaggcttgactccgccgttctgaaagagagggcgcggttttatgaagcatgatgtggattattccctttatctctgtactgaccgggcgcttatgcgcgcgcccacagtggaacaatgcgtagagcaggcggtaaagggcggctgtaccgtggtgcagcttagggaaaaggaatgcccttcccgcgagttttatgagcttgccctgcgtgtcaaagcggtaacagagcggtatagcgtgccgcttatcatcaacgaccgcgtggatatcgcgcttgcgtcagatgcgcatggcgttcacgtggggcagggcgatttgccggcggctgtcgtcaggagaattatcggggcagataaaatcctcggcgtgtccgcttcaacgcttgaagaagcggtaaaggcacaggaggacggcgccgactatatcggcgttggcgcgatgttttctaccgcaaccaaaacggacgcaaagctcgtcacgatggaggagcttatgaaaatccgcgcggcggtttccgtgccgattgtcgtaatcggcggaatcaatcaggaaacagcgccgctgttcaaaggctcaggcataaacggccttgctgtcgtgtccgcaatcgtcgctcagccggacatcgaagcggcggcgcgcggaatgcgctcgctgttcggggggaatgcgtaatggagcggataaagggcgcgatttttgaccttgacggtacactgctcgactcaatgaatgtttgggagcgcatcgacatcgattttctcgcaaagcgcgggcttgccgtgccggaggattatattgaggcggtcacgccgctcggcttttacgacgcggcggtttataccatcggacggtttcaattaaaagaaacaccgcaggcgctcattggggaatggagcgctatggcggcgtatgcctatgggaatacggtttccttgaagccccatgcgaaagcgtatcttacccaattaaggcaaaggggcgtgaggctcgcggtcgcaaccgccttgagcgaggagctttatgtgcccgctttgaaaaacaacggtatttacggctggtttgacgcgtttaccacgctgaatgagtgcggcggcaggaaaggggagccgaaaatataccgaagggcggcaaaaaagctcgggcttgacccttcggactgcgccgtattcgaggatattttagaggggatagagggagcgaacgcgggcgggtttattaccgtcggcgttgccgatttttattcccgttccgacagggaaagaatcttggagaaagctgactattatattgactgtttttccgatttgctggaaaaaccttaaaaaggggggaaccatttaaggttccccctttttaatccgctttttcctttttaaagcatttgcttcttggttttcagaaaacgtgctgtttcttggattgcttcattcaataaaaaaagaaacggcacgttacaaaaaagaaggaggaaaccgccgaaagggttatcctcatttgaataaacataattgaaaacaaaaatcaaaagcttgcgtataaaaaataaatagggttttaaaaaaggggaaagcatgattgctttcccctttttatcaattacaagctgcacccgcagccctcatggtcgtggccgcattccttgatttcaccgacaatcggcaccgggtcgatgcccctgcgcgtgtaataatcgctcagcgccgccttgatggcctgctccgccaaaacagaacagtgtaccttgaccggcggaagcccgtcgagcgcctccataaccgccttgttcgtaagctttaaagcctcgtcgatggtcttgcccttgataagctcggtcgccatggagcttgtcgcaatcgccgcgccgcagccaaacgtcttaaagcgcacgtctgtgatggtgtcgccgtcaaccttgatgtacatcttcataatatcgccgcatttggagttgcccacctcgccgataccgtccgcgtcgggaatttctccgacattacgcggattcgcaaaatgctccattaccttttcactgtatgccataacccttcatcctttccgagtcagttgttttcttttatgatgcgctcccacagcggggaaatcgaacggaggtattccacaatcgggggaaccgtctccaggatataatcgatgtcctcctccgaggtatcgtcgctaaacgaaagccgcatagagccgtgggcgatttcatgcggcagcccgatggaaagcagcacgtggctggggtcgagcgagccggaggtacaggccgagccggaggacgcgcagataccctttaaatcgagctttagcaggagcgattcgccctcgattccctcaaagcacatgttgaggtttccggcaaggcgcttgttgcggtcgccgtttaagcgggagcgttctatttttaaaagcccgtcaaccaggcggtttctcattttcgtaatgcgcgcgttacgctcgtccatcgtggcagccgcttccttcaccgcagcagctaagcctacgattccggcaacgttctccgtgcccgcgcgctggccgcgctcctgcgcgccgccgtcaatcaggatttccggccgcacgccgcgcctgatatacaaagcgccgcagcccttggggccgtgcagcttgtgcgccgtcagggaaagcaggtcgatgttttgcccctttacgtcaatcgggacattacccacggcctggaccgcgtcggtatggaacagtacgccgtgctttttacagatggccccgatttcaggaaccggctgtatcgtaccgatttcgttgtttgcgtacataatggtgacgagcgccgtgtcctcgcgtaaagccgcttccagctcttcgggacggaccaggccgtcgctgtgcacgtcaagatatgtgacctcgaacccttccttttcaagcgcggcgcaggtgtgcagtaccgcgtggtgctcaaaggcggaggttacaatgtgctttttgcccttctttgcaagcgcgcgggcagcgcccttgattgcccagttgtcagactcgctcccgccggaggtaaaataaatttcattcggcagcgcgttcaagcactgcgcaatgtcctgccttgctgtctcaaccgccctcttggcttgcgcgcccaccgaataaaggctcgacgggttgccgtaatattctgtcagatacggcatcatctgttcaagcaccttgggggagagctttgtcgtcgccgcgttgtcggcgtaaattttcctcatgatatatcaccttccgtattgcagattatttattgataccgccgtgccgccgcgaccgccaaagcgtcgcaccgttcgttttccggatgcccggcgtggcccttgacccaaaccacctcgaccgtatgcttttcacagagctttaaaagctcatcccagagctccgggtttaaagcgggctcctttttattgcgcatccagccgtttgcccgccattttttcgcccagccgagcttaatggcgttgcagacatattgggaatcgctgtacaaggtgacgctgcacggctcctttaacagctttaacgcttcaattaccgcggaaagctccatgcggttattcgtcgtgtttctttcgccgccggatatttccttttccgtccctttatagcgcatgaccgcgccccagcctcccggccccgggtttccctggcaggcgccgtcggtgtaaatttcaacgtgcttcaaggcgattctccttatatcttgtggtagtgcgcttattataccccttccggcaggcgttttcaatactttcgcggcgccttgcggcataacttaacaaaatcacaaattaagggcggcgtttttaaaattattgtcgcgtctgatggtgcaaatgcaacaaaattgattttattccaattgttctgtccgttggaataactgccgccggattgtgccatgatatgtgtgacggcgcagcggcgcaaaatgaagagatgcgggccatcccgccctgttagtttacgggaaaaagcgcggcctattcagaaaaacggcgcggaacacctgaataaattgccgcaggggaaaaaagcgcgcccatatgtgccacttgacagtaccgttgaaatagaataaaatggaggcaacgtatgtgaccggattcgttttttgtttgaagaaaatgtgttttaaaagatcgatgactctgtgcatggggcaccgtttgcggcacagaagaaaacaatacaatacagtcaatacataacgaatgaaattggaggtttatttgtgacatcagacaatcagaataagccgtctcagaagaagacggcttccaggaagccggcctcaaagccggccgcaaaaccggcggttaaggagaacgggcaaaagaaggccgccccggcgcgcggcagcgccaaaaaaccggcggaggctgctaaaaagacacagcgctacccgcagagaaaaagacagccgggcagaaagcccgcgaaaaagccgtctatcaaggtcgcgtttatcggcggcttaaacgaaatcggcaaaaatatcaccgtttttgagtgcaacggcgatatgttcatcctcgactgcggaatggcattccctgacggcgacatgctcggcgttgatttggtcatcccggatttcagctatatcgaggaaaaccaggataggattaaggggcttgtcatcacgcatggccatgaggaccatatcggttccatcccttacctgctcaaaaatatgaatttccctatctatggcacgagcctgacgctcggattggtggaaaacaagctcaaggagcataatctcctttataaggcaaagctcaacaaggtcaacgcgggcgatacgatttcgcttggctgtatggatgttgaaatgatacatgtcaaccattccattccggacgcggtcgccgtggctatccattcgccggcgggcacgcttgtgcacacgggcgactttaaaattgactgcacgccgattgccggcgaaatgatagacctcgcccgttttgcggagcttggaaaagagggcgtgctcgcgctctttgcagattcaaccaacgccgaacgccccggttacaccatgaccgagcaaaaggtgagcaattcgtttgaaacgctcttcaagcgcgcggaaaagaacaggattatcatcgcgacctttgcttccaacatcagcagggtccagcagattatcaactgcgccgcgcattacggcaggaaggtcgctttctcgggacgcagcatgataaactatatgacggttgccgcggagctcggatatatagacgtacccgacggcgtgattatcgatatcgacctgctgaagcggtacccgaaggaaaagatagtgcttgtcacgacgggcagccagggcgagccaatgtcggccttgtccaggatggcgtttgcagaccaccgcaaggttgaggtaggcgcgggagatttcatcattatttccgcaaacccgattcccggcaacgaaaagacagtcggtaccgttgtggatgagctgatgaagcgcggctgtgaggttgtttatgagtcgatgtatgaggtgcacgtctcgggccatgcctgccaggaggaattaaagcttattcatgggcttacaaagccgaagtattttatcccggtgcatggtgagcagaagcatttgagaaagcacgcgaacctggcctacagcatgggcatggaccataaaaacgtatttgtgggcgacgtcggcagcgtgattgaaattaaccaggattatttcaaggagcttgaatccgtccaggcgggcaaggtgtttgtagacgggcttggcgtcggcgacgtcggaagcatcgtcctgcgcgacaggaagcacctcggccaggacggcctgattatcgtcgtggcgtctatcgacgcgtacgacgcgcacctaatcgcggggccggatatcgtttcaaggggctttgtgtatgtcagggaatctgaaatgctgctcgatgaggtgagaaaggccgcggaggctgtgctcaacgactgcgcgtacgacaacatccacgagtggaacgtcattaaaaataaaatcaaggatgaggtttcacacctcatttacgacaggaccaggcgcactccgatgattttgccgattattatggaggtctgatccagggttaaaatattggttccggcggaaggagtatggtaatgaaaaaaaaggtttggaccttgtctccctattttttgattttttccggcgttattcttggaatggcgctctactccatccgctggaatatttatgtattctacatcgaaattgctgtcgccatcctttccatcctgctcgtttatgtcaacctcaaacggtttgagcggtatacggcgcgcgtcattaaaagcacgcttgcgggtattaagggggtcaataccagctatctcgaaaaattctctgtccctgtcgccgtcgcgggcgaccagggggacgtcatgtggtacaaccaaaagttcaaggaacgcctgtgcagcggccgggaggcgacaggcgactttatcagccagtacataccgggctttaccgtcgacgaaatcctgcaccatggcagcgcggacgtttcctacgggaacaggcgctatacggtgcttgcctgttcggtggcggacggcgcggttctttattttatcgacgatacatattacaagaataccgcgaaggaattcgtggaaagccgcccggcggtagcgatggtcgtgtttgacaaccgcgaggagttcgagcgggaaaacgacgacgagcagagcgcacacgccgttgtaaccattgaaaacgcgcttcaaaaatgggcggcaaaatacaacgcgttatttaaaaaggtttccggaagccgttatatggtgatttttgaggaacgcttcgtacgcaagctcgtggaagaaaagttcccgattcttgaggaaatccgcagcattaagtttgcaaacaacagggaagctaccatttctatcggcatcgggcgcggcgcgcagggctttaaggaaagtgagctttgggcgcgcagggcgcttgaaatggcgctcgggcgcggcggagaccaggccgccgttaagacgagggacgagttcaggttcttcggcggcgtatccaagggctatgaaaagttcgacaaggtcaggacccgcgtaatcgcaagcaccctttccgagcatatcaagggcagctcccatgtgcttttaatgggccataaaaactcagatttagactgtgtgggcgcggcaatcggcctgtggagcgccgttacaaaggcgctgcaaaagccggcgcatgtcgtcgtcaggaaagggcagtcgcttgcggggccgctgatagacagctttttaaacgcgggcggcgccaacatgtttatggagccggacgaagcgctcggcgcggtgaatgacaaaacgcttcttattgtggttgatacccattcgccggcgtttttggaaagctccgagatttaccagaaatgcaagcaggtcgtcgttatcgaccatcacaggatgatggtcaaccggatagaaaattctatcgtctttttccatgagccgtatgcctcgtccgcttcggagatggcgaccgagctcgtacaatacctgggcgacaacgtattgacccggctggaggcggaggcgcttctcgccggcattatgctcgatacaaagaattttgttctcaaaacgggcgtgcgcacgtttgaggcggccgcttacctgcgccagcgcggcgcggacacggtcgaggtcaagcggctgttttctaattctatcgacgcctacaaagcgaaataccagcttgtttcacaggctgaaatctataattcctgcgccgtcgcgtgcgcggaggacgtcccgccggacgtcagggtaactgcggcgcaggctgcagacgagcttttaggacttcaggacgttcgcgcctcgttcgtcatttattcggcggacggctgtgtcaatatttcggcgcgctcgctcggcgatgtgaacgttcaggtcattatggaacagctcggcggaggcggccaccagacgatggcgggcgcccaaattgaagggcagcctttgagcgctgtgcgcgacaagctgattgaaattataagccatctcgattcataaatcgcacagaattttactggagggaaccgatatgaaagtcatacttttacaggacgtcaagggcagcggaaaaaaaggagagcttgtaaatgtctccgacggctatgcaaggaactacctcctacccagaaagctcgccaaggaagcgaatacacaggcgatgaacgagctgaaaaacgcagagcagtccaagcagtttaaaattgattctgataaagccgcggcaaacgacgcgaaagcgaagctagacggcgcgactgtcaagatttacgccaaagcggggcagggcggcaagctgttcggttccgttacggcaaaggaaatcagcgaggaaataaaaaaccagctcaaaattgcggttgacaagcgtaaggttacgctcgataccgacatcaaggcctacggcaccttccagtgtgccataaagctctacgcgggcatttcggccacagtcaacgtggtagttgcagaaaaggcctgattgctttataatagggaataacggcggagggggcggttcgcgcccccttttcttcacggcatcaagctggaaacaaagcgtatgcgcaaagggaatgggattaaaaaatggcggaaatgaacatcacaaccggatatgacggcctgaagatgccctacagcccggaggcggagcaatccgtcctcggcgcaatccttctcgaccctacctgcctggacaaggtggcagagctcctgcccaaaccggactatttccatcttgccaaccaccgcgcgatttacggcgctatgctcgatatgttcacggtcggcaaaacggtcgattttgtcacggtcaacgagcgcttaaagcaggacaagacgtttgacgaggcaagcgcaaaaacctacctgatgcagcttgcggagattgtcccgtccatttccaacgtagaggtatacgcgcgcatcgtgcgcgaaaaatacgaggtgcgcagcctgattatggcggcgcgcgatattgtggaagaggcggcgcagggcgaatacgattccgaaacgctcatcgattccgcggaacagaaaatttttgatatccgcaggggtaaaaatatccaggggctccagcgtatcgacgaggtcattatcgaaacgttcgaccggcttgacctgcttaattccgaggacagcgagatgattaagcccatttccacgggaattgccgatttagaccggatgattaccgggctcaaccgctccgacctgatactgctggcggcgcgccccggtatgggcaagacgagctttgcgctcaacatcgcccgccacgcggcggtaaagggcaagcgccgcgtcgcgtttttctccctggaaatgtcgaaggagcagctcggctcccgactgctttcaacggaaggcttaatcgagggtacaaagctgcgcaccggcaagctcaacaacgacgaatggacgcgcctggtcgaggcgggcgacgtactcggcaaggcggaaatttacctggacgacacgccgggcatctctgttcctgggatgaaggcaaagctcaggaggcttcgcggcgttgaccttgtcatcatcgactacctgcagctgatggccggcaacaggaggacggacaaccgcgtacaggaaatctctgaaatcaccaggaacctgaaaattatggccaaggagctggacgtacccgtcattacgctgtcgcagctttcgcgcgcaagcgagcagaggaccgaccaccgcccgcagctctcagatttgagggactccggctccatcgaacaggacgccgacatcgtgctgttcctctaccgtgagggctactatgaaaaggacgcgggtgaggacggcgccgaccagaacagcggcgagtgcctggttgcgaaaaaccgccacggcgaggcgggctcggtcaagctccactggcagggcgagtttatgcgctttaccgcgccggaggtgggccgtggagactaaaatcctcacaaccatacaaaaataccggatgcttgaggccggcggcagtattgtcgccggtgtttcgggtggagcagactctatgtgcctgcttcactttctttatattttaaggaaagattggaaccttaccgtcatagccgcgcatgtaaaccacggcctgcgcggggaagaggcaaagcgcgacgaggaattcgtgcaaagctggtgcgaggcgcatggagtaccatttgaggtgcttcacgctgatgtaaacgcgcttgcaaaggtaagcgggcaggggacggaagcctgcggcagggacgtgcgctaccgctttttttcaggccttgcggaaaaatacggcgcatcgattgcgaccgcccatacggcaagcgacaacgcggaaaccgtactgttccacctgatacgtggaacgggaacgcgcgggcttagcggcataaagccagtgcgcggcaatattgtccgccctcttatcgaaataacgcgtgaagaggtggaggcctactgccgggaatacgacgtgccgtaccttacggattccaccaacttgcgcgacgactatacgcgcaacaggctgcgccaccatctcgtcccgttgtgcaaagaaatcaacccaagctttgaaaagggcgtgctgcgcctgtccgaaacgctttcgcacgatgatatgtactttatggaacaggcggaagccgcgctcgataacgcgcgcctcgggaacggaacgtactccggtaaaaggcttgcggcgttacccgcgccggcgcttgcgcgcgcggtcatgctgtgcgcgcaggcgttttcctgccggtgcatggagcagaagcatatcagcgctgtctgcgggtttatatatgagggggccggcgcgtgcgatttgccatgcggccttcaggccattgtgtcgcaggggatgttccgcattgtgcaaaaggagaaacctgccgaaaagtgggaaattcccctgactgatgcagtttccttaacgaaatacaacaaaaaattaaacgtttgcgtctgctccaaaatggaatatgacaaaaaaacgaaatttaacaaaaagttattaaataactccatggactatgctataataagtaaacatccggccttccgcacgcggagggaaggggacacgtttttgcccttgggtaaaaacgggacaaaaacagtaaaaaagctttttaatgaatacaaaataccgcgcgagcagcgcggtaaaattcttctgctcgctcggggcagcgaggttttgtggattgacgggtacggcgtgtcgcagcatgccgcggtttccgataaaacacagcgcgttctcattattaatgttgaaacggcggaggggtaagctccgtttgcttcggagggaattatggaaaaggatattaaaaggatactgttaagcgaagaggaaatcaaagcgattgtgcaaaacctggctgaacagatagaccgcgactaccagggcaaaaagcttgtaatggtcggccttttaaagggaagcgtcgtatttatggcggatttgatgcgcgcgctcaagacaaggtgcagaatcgattttatggtaacctcgagctacggcagcggcacacagagcagcggcaggctcaatattttaaaagacctgtccgctccaatcgacggctgcgacgtgctcgtcgtggaggatattatcgacagcggcgtaacgctgagctttatccttgactatctcaaggcaaagaacgcaagcagcgtaaaattatgtacgctcctcaataagccggaccgccgcaaaaaggaagtgccggtcgattacacaggcgcggttatcccggacgagttcgtcgtaggctatgggctcgactatgccgagtattaccgcaaccttccctatatcggcgtattaaagcctgaaatctattctgtttaaacgccttttgttttacatatactatcctaaggagtgaacatattggagaaaaataacaagacgctgctgcgtaatctgctgatataccttggcatcccgattgtgctgattcttgtcgtcgcgacgattttatggtcgcagccgcaggtatccatcaaatattcccatatcgtccaactgtttgaagagaacatggtagaggaattctcgatggacctcggttccggcgcgatggaaatcaagctcaaggaaggcgcgaagctttcggatgtaacgggtgaggaggcgacccagccgcaggctcaaacgaacattttgggcaataacgcgcagaatcagcaggaagacaaaacgaaaaaccagattatcaaatacacggcgcccagcccctcgttggtttatgaggacatcaaggattatatcaaggcttataacctggaaaaccccgacaagccgatgatatacgactataaggcggcaaacgaaaattcgtggctcttaagcctcctgccgaatatcatcatcacggtgctgatggtcgtgctgttcctttatttcttccgcaagatgtccggcatgggcggcgacccaaccaagcagatgggcttcggtaaggcgaaaatcaaggatatgaacgacgagaagcgcaagacgacgtttgaggacgttgccggcgcggacgaggaaaaggaagagctcgaggaaattgtcgagttccttaaaaacccacagaaatataacgatttgggcgcgcgcatcccgaagggcgtgctgctcgtcggccctccgggcaccggtaaaacgctgctggcaagggctgtcgcgggcgaggcgggcgttccgttcttctcgatttccggctcggatttcgtcgagatgttcgtcggcgtcggcgcgtcgcgtgtgcgcgacctattcgaccaggcaaagaagaattcgccgtgtatcatctttatcgatgaaatcgacgcggtcggccgccagagaggcacaggcctcggcggagggcacgacgagcgtgagcagaccttaaaccagctgcttgtagaaatggacggcttcggcgtaaacgagggcgtcatcatgatagcggcgaccaaccggccagacatcctcgacccggcgctgatgcgccccggccgtttcgacaggcaggttgtcgtcggttaccccgacatcaagggcagggaagccatccttaaggtgcatgcgcgcaaaaaaccgctcgcgcccgacgtgcggctcgacaccgttgcaaaatcgactgccggctttacgggcgcggaccttgaaaacctcttgaacgaagccgcgctgctcgccgcaaggaagagcaagaaggccatcacgatggaggaaatcggggaagcgaccatcaaggttgtcgtcggcgcggagaagaaaacacgcgtcatgaacgaaaaggaaaagaagcttacggcataccacgaggcgggccacgccatcgcgttcgaggtatgcgagacgcaggacagcgtccaccagatttccatcataccgaccggtatggcgggcggctacaccatgccgctcccggcggaggataaatcctacaactccctcagggagatggaagaggacatcgtcgtcgccatgggcgggcgcgttgcggaatcgcttattatgggcgatatctccaccggcgcgtcgaacgatatccagcaggcgaccaagacggcgcgcgccatggttacaaagtacggtatgagcaggattttagggccaattgcctatggcgaaagcggaaacgaggtctttatcggccgcgatatgggccatgtcaaggattattccgacgaaacggccgcaaagatagacgaagaggttttccgcattgtgaccgacagctacaagcgctgcgaggaaatcctcaacgcgcatatgccgcagctgcacgcggttgccagattcctcatcaagcatgagaagatggaccacgagcagtttatggccgttatgaacggcacctatgtggaagagccggaggaggaagctcccgccgcttttgaagattcgtcggacggagaagtcaatcattgatttttaggtaacagaggcaacgggacgggggcttgctcccgtcccgtttttaaaacaagagggatataggaaaagggttcaggtgaataaaaaacatgtcttcaaaaaatatcatcgtcaggggcgccagggagcataacctcaaaaacattgacatcgaaatcccgcgcgacaagctcgtcgtgcttacagggctttccggctcgggcaaatcgtcgcttgcgttcgataccatctatgcggaggggcagcgccgttatgtcgagtcgctctcctcctacgcaaggcagtttttagggcaaatggaaaagccggacgtagacaacatcgaggggctgtctcccgccatctccatcgaccagaaaacaacatcgaaaaacccgcgctccacagtgggcacggtaacggaaatatacgactacctgcgccttctgtacgcgcgcatcggcattccgcactgcccggtatgcggcagggaaatcaagcagcagaccatcgaccagattgtcgaccgcgtcctcgctttaccggaaaaaacaaagatacagattttagcgcccgttgtgcgcgcaaggaagggcgagcacttgaaggagctcgacgccgccaggaagagcggctatgtgcgcgtgcgcatcgacggcattatctatgacctttcggagccggtcacaccggaaaagaataaaaaacatacgattgaaattatagtggacaggcttgtaataggaagtgacatccgctcacgtttggccgattccatcgaaacggcttcttcgcttacaggcggcctgattgtcgtcaacgtcatcgacggcaaggatttggccttttcgcaaaattatgcctgtccggagcatggaatcagcatcgacgagcttacgccgcagatgttttccttcaacaacccgtccggcgcatgtaaaaaatgtacgggcctgggcgtgtttatgaaaatcgacccattgcttatcctgcccgacaaatctaaatccatcaaccagggcggcatcaaggcgagcggctgggcgatggaaggcagcacgattgccgccatgtatttcgaagcgctgtcaaaggcatacaaattttcgctcgacacgcctgtaggcgagctgccggacgaggtaatcgacgtcctgctctacggcacaaagggcaggaaaattaaggttgtgcgcaaaaacgagtatggcagcggcgtttaccagaccgaattcgagggcgtcatcaataacctggaacgccgtttccgcgaaacgcagagcaactggataaaagaagaaatcgagtcgtttatgagcgctatcccgtgcgacgagtgcggcgggcgcaggctgtcgcctgaaagcctgtcggtgacggtcggcggcattaatatcagcgaattttgtgacttttccattgtagacgcgcttgaatttatcaattcgctcaagctttccgagcgcgaaacgatgatagccgaagcaatcctgaaggaaatcagggaacgccttggctttttaaacagcgtaggcctaaactatcttacgctttcgcgcgcgtccggcacgctttcgggcggcgagagccagcgcatccgcctggcaacacagataggctcttccctgatgggcgtactctatattctcgacgagccgagtatcggcctgcaccagcgcgataatgacaagctcctgaaaacgcttgaacgcctgcgcgatttgggcaacaccgtcatcgtcgtcgagcacgatgaagacaccatgtacgccgcggattatatcgttgatatcgggccgggcgccggcgtacacggcggcgaggtcgtctgctgcggtgacgtaaacgaaatcaagaagtgcggccgctccctgaccggcttgtatttaagcggcaagcgcagggtagaggtaccgcaggaacgccgcaagggcagcggcaaaaagctgcgcgttacgggcgcgcagcagaacaacctgaaaaacattacggtagatttcccgctgggcgaattcgtctgcgtaacgggcgtttccggttcgggcaaatcgtcgctcatcaacgagattttatataagcaccttgcggcaaacctaaacggcgcgaaaacgcgcgcgggaaagcataagagcatcacggggcttgagcatctcgacaaggtcatcgatatcaaccagtcacccatcggcaggacgccgcgctccaaccccgcgacctatacgggcgtgtttaccgatatacgcgagctgtacgcctccacacaggaagcaaagatgcacggctttacctccagccgcttttcgttcaacgtcaagggcgggcgctgtgaggcgtgccagggcgacggcatcttgaaaatcgagatgcacttcctgccggacgtctacgtcccctgcgaggtctgtaagggcaagcgttacaacagggaaacgcttgaaatcaagtacaagggcaaaagcatccacgacgtgctggaaatgacggtcgaggaagggcttgaatttttcagcagcatcccgaaaatcgagcgcaagctccgcacactgtgcgacgtggggctcggctatgttaaaattgggcagcccgctaccacgctttcaggcggcgaggcgcagcgcgtcaagcttgcgacagagctttccaagcgctcgacaggccggacgatttatattctcgacgagccgacgaccggcctgcacattgcggacgtccataagcttattgacgtgctgcaaaagcttgttgacagcggaaacacagttgtggtcatcgagcataacctcgacctcatcaaaacggccgaccatatcatcgatttggggccggagggcggcgacaagggcggcttcatcgtcgcgcagggcacgccggagcaggttgcgaagtgtgaagaatcatacacggggcagtatctgaaaaaattccttgagaaataagcttctctgttcggcagggcagaagggaaggagtttgacctgatgtgcaatccatccgctttttgcgcaggggaatacgacgaacaaatcaaacggacgctccctttttatgaagaattttataatcaggcggtacgtgccgcggcggcgttgggtaaaaccggccttaattggctggacgtcggctgcggaacaggtaaaatggcagagtcggcttaccgccggcttgatatcggccggtttgtgttctgcgacatctcgcgggagatgctacaaacggcgaaagacaggttttcctctttttccggcacacaattcattttgtgtccggcacaggagcttgctttccatgaggaattcgacgtggcgacggcaatccaggtcaaccattatctcagccgcggcgacaggcgcagctcggtaaaaaactgttttaacgcgctcaaaagcggcgggcttttcctctcgtttgaaaattttgcaccgtacagccaaatgggaaaagagctgtatctggaaagatggcgacgcttccagctggaaaacggcaggggagctgcggaaagcagggcgcatatggaacggtatggaaatgcgtattttcctatcacgataacagagcatttggagctcctgagagaatgcggcttccgctgtgcggagctgttctgggcttcctatatgcaggccgggctgctgggaataaaataaaaggcaaacacggcgggcggttccgggcggagccgcctgttttaaaagcgggcccaggcaaactcggccggctgcccgcgcctttttaggcttatgtaatatgaaaaccggcacaataaaattgactttccctttccgcggtgctactctttgagcagaaggccgttcgttttggaaaagaagcatcaaagtgcaacatgcgtcaggaaagaggagagagaatgccgatatataaaaaagaggcggctccaaataaaaagagaaggcgcgttttgcgtgcttttttcgcccttgtgattctttgcgctgcggtatgggggattgccgcgcttgctgacagcatggacagcgcgcagctttcggttccatatatcacgcaggagggattgctgccgaccggctgcgaaacggtcagcgccatgatggcgctatcctatctgggcgtggacgcaagcgctcaggacatcctttcccatatggtaattggtgagctgaaaccgaaaggcggcggatataccgcgcccagcccggatgaggcgtttatcggcgacccatacagcgaaagcggctacggctgctacccgccggtgattgtccgcgcgcttgaggacttggtgcccgaagggatgcggccggccgatacgacgggcctatcgctcaaacagcttgcgcgtgaatatgtgaaaaacggaacgcctgtcctcgtttgggcgacggtcgatatgcagcccgccgcagagggcgcacaatggcttgttccatccacaggggagctttttacatggccaaggggagagcactgcctgcttttgaccgggtacgacaggttttattattatttcaacgacccatatgaaaacaggggacgtattgcctacccgaaggaacaggtaaacgcgcgttttacggagcttggctcaaaaagcgcggcgattattaaaaaatagaacggtaaggcgtgatatggcaaatcaggtttaacaggtttaagaggtggcaagctatgaaaattttaagcttcgcgttgtatttagtggggatatgcttttgtattgcgggttttacaggccatctccaggcgtttgccggtgcggccttgagcttttttgcggcgacaatgatattggtaaaaaaggcgaaaaataaatagcgcaaatctgagcagcgggaaagcgtatactgaaaaaatgaaacctgagaggtttatttatatatgaagatacatctgaaaaatgacaggctgtgggaacaaacgaaggcagattgttcgaaatgcgcaggactctgctgtacagccctgtttttctcaaagacagacgggtttcctcagaataaagccgcgggcgtaccatgtatcaatttgcttgggaattatcgctgcaaaatacattcatgcctggaacagcaaaaaatgaagggctgtatcggatatgattgttttggcgcgggacagcaggtaacgcaggttgtttacaaagggaaagcatggagggatttaccggaacaggctgccgaaatattcgatgtgtttacggttctttttcaaatacagcaaattaggtattttttaactgaggcgctgacgctcaatcccgcagccccttacaagcgtgatgttcaggatatgatggaccaaaatattataatctgcagcggctctccggacgatatcttgtgttttgacgtggacgcatatcgaaacagcgtaaatacggttttaaagcaaatttgcgccttgctgcggcagaatttacatagtaaagggaagcgcagcccgaaaagctttttaggaaaggcatttaaaggagaagatttgagctggctggatttcagcacgaagcttttgattgcggccgactttacgggatgtacctttgatggaacaatttttcttggcgccgatacaagggatgcaaatttcacaagcgcggatttacgggaagcggtttttcttactcaggggcaaatcaactccgcaaagggcagccgtgatacaaaaataccgggccatctggattacccagctacatggaagtaatataacgcttccgccatagggcgccggtttattttataaacgccgccggaacaaggaagattctatataaagacaaaaacccccgaaacgcatagccgtttcgggggttttataccagtttaaaaaatccgtgttacgccgccgcgctggaagacaggttttcatggctttgctttagcacgcgcttcatcattttggcaacatcggtgttgtcgataagctctttgtcaaacagcgtatcggcctgcgcgcccgccgcgaaaatgccgactggtgtgctggtgtgttcgccgcctgaggtgaacaggtcgcttgtaaggtctttcgcggtcgcgccctcaggaatttttacgccgcccgtttcatggtcggccgtaacaatgacgagcgtacccgggtgcttggaagcgtaatcgagcaccgtgtcgattgcgtggtcgaacaccttcatttcatttaaggtcgcgtccatgtcgagcagcgcctcgcgcgtgtcgatatcggagccctcaaccatcaggaaaaagccgttgtcgttttcaagcagctcaagcgcttttcttgtttctgtctcgagcgacggtttgtagcccgcgagaatgttctcataccggaacatgccaagcacctttttgccgggcttgagcgcatcaagctcagcgggtgtggaaacataagtataatcgtgttcttcgatgagctttttcacgcccttcctgtaaaactgctgcccgccgccgagcatcacgtcgatgtcggccttgagctgctggcccagaatctgcataaaggcgtcccggttccccacgtgcgccgtaaatcccgcgggcgttgcgtgcgccacgtgctctgtcacggcaaagccgaccttcatgccatagccctttgcggcctctgtaatgctttccacagggtcgttgtctttatccacgccaatatatttgttgtacgttttgacaccgcaggcaagcgctgtcgcggcggcggcgctgtctgttgtacccgagagggagtcggttgtgacctgcgccgtatagggcatggcggcggttgcaaatttaccgcccttctggatttcagcacatttgatggcgttcaggcccatgccgtcgccaatcatcaaaataatgttctttacaggtacgccggtttccagcttgtaatctttaaattccgcgtaggtaagatttttgtctttcacgtcgtcgggattttccgtcgctgcctccgtcgcctgcgcggacgagcccggctgcgatgcatttgcgggctgcgcgctgccgtcgcaggaggcaagcgccgccgcgctcaaaacgatgagcgccgagagaatggttgccaatgctttcttcatggttctttccttcctttattatgatgataggagctgcataaaagcatcaatcccagtcggtgagcctgtcgcccgttacgagaaaggcgcttgacgcaatgtcgcgaagcgggcggtcgctctgggagtccgaataaaacgcatcaatttgcccttgcggaaacatctcgtaaaaacggcggaccttttccgtcccatgacaattaacgcccgagtacacacccgttatcgggtcgacctcggacgctattaaaaaacgcaccccgagctcagcgcagattggttcgagcagaaaacgcggggaagcggagataattacgtcgtcctcccgtttctgaagcaaataccatgttttaattttatggcggtttttgccccaaaatgcgggtacgtccctttgtatgtccacgcagcttaaaaacgtgtacattttctgcttgaactgtgtttttgtgcagctttttgaaatatagtgcgaaaaagcgcccgtcagggcgttcggcacatatttcagcatctctgggtgtttaattagagaatacaaataaaaatccctggtgctgtcgccgttatatatcgttttgtcgaaatcgtaaacgttcacactaccaccagaattcctattattgtcttattataatattgattacagatttttacaaggcaaaaagctgttaaaatttacaattagttaattttaatcgccggaaagtattgtagaataagaaaaagaaaataataaaagggagaaaatttttttgttcggatatatcaagccctaccagccggatttgcgcatcaaagaatatgaagcgtacaagggtgtatattgcgggctgtgcaagcgcctcggtaaggattatgggattctctcccgttttatcctgagctacgactgcacgttttacgcaatggtacgcgtaagccttatgggcgaatgcccaggcttcgagcagggcaggtgcacgttcaacccgctgaaaaaatgcaccttctgcaagggctcgcaggaaacgctaagggaagcggcggcgctcagcgtcgtgactttttactacaagctgctcgacgacatcgcggacgaaccctttttgaaggccctttttaaaaagctgctgaagcccatagcggggcgctggcgcaaaaaggcgctgaaggaattttcaccgctcgacgagattgtttcccaaatgcttcaggaacagcttgcggcggagcaaacgcccggatgctccctggaccgtgcggctgatcccactgcgcacatgatgcagcggctgatggggcgcatggcggaaaatgaaacgcagcggaaggtttactcccacttcggctattatctgggaaaatggatttatttaattgatgcggcagatgatatggaaaaggacaaaaaaagcggaagcttcaacccgtttttaaaggagcttgaggggaggcgggcgcctcttgcaaaagaggaggaaagccggtactgcaacgaggttttaaactgtaacgtcagtatgatgctttcggcctttcacctgatggagcttcacgtgtttcgggaaatcatcgaaaatattacaggacccggaatcgcgcagatgcagaaaaaggttttgtttgataaacgggaggtttctcccaaacaaattagggaagaaaagatggaagaaccggcgccgtccgttgacggtacggataccggtataaaggggtaagaaaagtatatgcagcaggatccatatcaggttttgggtgtttccagggaagccaccgacgaagaaatcaagacggcttaccggaatcttgcaaaaaaatatcatccggacaattacacggacacgccgctttctgacgttgcttcggagaaaatgaaagaaatcaacgaggcgtacgacaccgtaatgaacgcgcgcagaaacggcgggaacgcggggaatccgggcggcgggtacggcggctattacaacgcaaacccggggtacggctcatcctcgaagtattcggacgtcagggtgctcatccagaccggccgccttgccgacgcggagcagattctcgatggggtgcccgcccaggggcgcgacgctgaatggcatttcctcaaaggcacaatcatgcttaaaaagggctggacggaagaggcgtataagcacatgcagacggcgtgcgccatggacccgggcaacggggaatacaggcaggcgatgggctacgtacagagcaggagaggcggagcctacggcggatacaatacccagcagccggtcggcggaggatgctcgacctgcgatttatgttcgggcctttgctgcgcggattgctgctgcgagtgcatgggcggggatttgattccctgctgttaaaaagaaacgcaagggaacgtgaaagcgttcccttttttatggaggaatgtcgcgatgaacaaaagcttccaggtagcgctcggcggcgtaatggccgcgctgagccttgcaattatgctcctgaccgggtttatcccaataggaacctacgcatgccctgcccttgcgggaatccttttaatcgccgttgtgattgagctcggcgcaaaatgggcgtgggcggtgttcgcggccatttccatcctgtcgctgtttttcgcgggagacaaggaggccgcgctctatttcgtcatgttcttcggcttttaccccattctcaaggcaaggatagaaacgctcgcaaaaaagtggccgcagcgtattttaaagcttgcggtgttcaatgccagtatggtcgccgcgtttttcctcgcgctctatgtattttccgttccggccggcgaatttgtcattttcggtatttatatcccatggctgtttttgcttgcgggcaatgtgtttttcatcgtctacgatatagccgttacaaggctagttatattgtatgtccgcgtatggaggaagcatttgtttaagggaatcaggaagcagtaaggaatttatgtcaattttgtaataaatcgagggcgttttcttgtcatatccacctaaattacaaacagtatagttaaaaacttgtcattttttgaatcggatagtataataaagcttgaaccttaattttatttttccgcacggctgcgggaaaatttcaggaaaggagcgccaaggatgctatcctattcaaaacccgtgcaaacgggccataaatcttacataaaagtaatctctgttatctgttcttttactattttactctctgtatttgcgattggtatgacaggcgtatccgccgcgtcgggcagtacggttaaaacgacggcggcgctcaacctgcgcagcggcgcgggaacgtcgtattcttcggtctgcctgatggagaagggctggaccgtttcgcttttggcggacagctcgaagggctttatcaaggcaaaagcgcaaaacgggaagacgggctactgcagcaccgattttatttccgtaaaggacggacttgacgggatgaaggtcacggcaaggacgaccgattacctcaatctgcgcagcggtgccgggacaagctattcctcgctcgaggtactcggcgacggagtggatacgaccgtgcttgacaataccgacaacgtgtggattaaggtcaaggcgaaaagcggcaagaccggctatatttccagggattatgccacggtaaacgttacgctgccgaaggatgaagacgacgtgggcggcagcgtcgacgacgagcccgccaaatcgaatacggcgcgtcccggctggtttgaaaattcaatagcggacaacatcgttgggggggattcctccaataacatatataatggcagcttatatctgtccgacacagcgctttccctggaagaaggggacggcaaaacccttacagcgtttctttcaagcgcggcaggggcgcaggcggcggtcacgtggaaaagctcgaacccttccattgtttccgttacttccgccgggcagctcaaggcgctttcaaagggcgtttcaaccattacggcgacgcttatgggctcagggagggcggcttcctgcaaggtgacggtatcgggacaaaagacgcagagcgtctcgctttccccaacgtctgtcacactgtcaaaaggcagcacaaaaatacttctggcctcgacaacgcctgcaggcggcgcggtgggctggtcaacaagcaattcgtcggtcgccgcagtcaattcggcaggccttgttaccgcaatttcagcgggaacagcggtcattacggcgaaagccgccgatggcggcggtgcggaggcttcctgcgttgtgacggttaccagcacaaagtacgtgcagaacatcgagctcaatacctatgcgataaaatggccggttggcagaacaggaagctataagccttccgtatcgcctgccgacgcgacgaataaaaatttaacgtggaaatcgagcaacacttccgttgcggcagtttcctccgcgggcctgttaacagcggttggccccggcacggcgacaattacttgtacggctgccgacggcggcggggcaaaggcttcctgccaggtgacggtttaccagccggttacgtcgattacgctcgacagctcgagcctgaactggagcgttgggaaaacaggcaccctgaaggcgtctgtctccccaagcagcgcgacgaataaaaacgtaacatggaaatcgagcaacacaagcgtcgcgacagtgtcctccgcgggtttagtaacagcggttggctccggcacggcgacggttacttgtacggcggccgacggcagcggcgtctcggcgagctgtaccgtcaaggtcagcgcggacgccatcagcagcatactgcttacctctacggcctcctccatttatacggggaaccatgcatacatcaatgcggccaccacgcccgccaataaaacggtcaattattcgagcagcaatacgtcagtggccaccgttacgcaaagcggtattgtgacgggcgtttccgcgggcaaggcggtcattaccgtcaaggacccgaaaagctcggtgaaaaacacctatacgattacggtcgtttcctcgtcaggcggcgtttcactttccaatacgacggcctccgttgcggcggataagaccttctatctgaaaagctatacctcaggcacaagcttcaagagcagcgatacctcagtggcgtctgtcagctcaaagggctttgtttacgcaaaaaaggcaggggttgcgattataacggccagcgccaacggcaaagtgaaaacgtgtgcggttacggttacagccgcggcgcccgtacgctttgcgtatacctccccgaactccgccgcgcttggcgataccgtctccttctacgcgattacagacaaaacgcgcgacggagcgaaatttaattttactgtcaacggcaaggattattccgttacggccaccagtaaaacgaccgattcctccggcagccattatatctggaagggctccatgaaattcagctcctccggcacgttctccgttacggcatatacgagcaaaaacggcgtatggtccacctgtacggacggcaaaacgtcggtgttcgtgtcaaatgttgcgagcgcgggtaccgtatcgtttaatgaacggcgcgcaagcgacgggctgctgcgcctcaatgcggattacgagggctttttaggctccgtgacggacgacccgctcgtatcagacgcgccgacgctcggctacgggaaggtcgtcacggcgggcgagcagttctataacaatatctcaaaggacgaggcatacgcttatctcgtccagacgatgaacggtagctcctacacgaacgccgtaaataatttcatgcggtcgaacaatgtaaaattcaaccagcagcagtttgacgcgctggttatgatggtgtataatcttggagcgggcgtattgggcgattccgacgtcaagcgcgtattgctcgactgtgtggaatccggttccaccgcgccgacaggctcgacagcgtctgtcaactcgtccgacgggctgatgctgcgcaccgggccgggtactagctataatatcattaccgtaatgacctataatacgaaggttacggtggttgaaaaaacgacaagcagctggtataaggtcaagctgtccgacggtacaaccggttactgtgcgagcgaataccttacgtttgcctctaccagcgtgcgcaatttaaaccttgtaaacaagaacgcggtcatcggcgagctgattcagtggcatcacgccggaggccagtgcgtctgggggcttttgtacaggcgcatcgacgagcttgaggtttttttctacggggattatataagggacggctcgtcgaacaaatacaatatggcataccgctggaactgctgattgcaggcttttccagacaaatccgaaacgcggctgacggaggatatttctgtgcgaaaccatgtagtggacaactatgagaattaccgggaagaagacaggctgaccacgaaccacgccagaaaaattgaatttattacgacggcccgcattttagatgaacacctgaacgggaatatgaagatattggattgtgccgcgggtacgggaatttattcgttttacctggctgataaagggcatcaggtcaccgcgaccgatatcacgcccaggcatatagacataatagataaaaccttaaaagagaaagcataccaaatgcggacggctgttttagacgcggcagatatgcatatctttgcagatgaatcgttcgacgccgtgctgaatatgggtccgttttaccatttaatatcaaaagagcagcgggacaggtgcatgtccgaatccctgcgggtactgaaaaagggcggccttttgtttaccgcgtatataccgcgctattatgtttttcagtttgccgctatgtctgacagcaaatatttagacaaacggctcgcggagcaaattgtcggaacaggtgttttaacgcatgacgacgagaaatgcttctggacggatacatattattcgaccgcagctgaaatggagcgtatgtattcacagtataacgtagaggtaaccgaccattttgcccaggacgggcttacgccgttatttgccggcaaagctgatagctggacggaagacgaattcaagacctggtgcggttatcattacagcgtatgcagggaacaatctgtactgggcgccagcaaccatgtaatcattgcgggaaaaaaattataatgcgaaagctaatttcgctcaataattcatatttatcagcaaaccggccgagagtccggcgaaagccgtgctttcggccgcgttttgcgcagggaggatttttcatgaaaaagcaaatcggttttatcggcgccgggaatatggcgaccgcaatcatcaacggcatgattaagaacggggcgttctcgccgtcagacatccatgtgttcgatattgacaacggcaagcttaacgccatggcggacaagggcgtcagggtacacgacagcgcccggcgcattgtagaggcctgcgggataatcgtccttgccgtcaagccgcagaattataaggacgtgctcacgcctctgcgcgctgacattacagaagaaaaggtgttcgtatccattgcagcagggatttctatcgattttgtaaggaaagccctgtgctgtgactgcccgtgtgtgcgcgtcatgccgaatacgccgcttcttctggggctgggcgcgtcggcgctctgcccgtctgaaaatatcagcgacgaggactttcaaaccgtatacaatatgtttgcgctttccggcgtgtgtgaaatcctgcccgaaagccagatgaataccatcatcgcggtaaacggcagcagccccgcgtatgtatacctgtttgcaaaggcaatggcagattacgcaaaggagcagggcatcgacgaagaggcggccatgcgcctgatttgccagacgctccagggaagcgcgcagatgctgctcgattcgggcgatacgccggacgtgcttattaaaaaggtatcttccccgggcggcactacgctcgaggcgctcaagacgcttgagcagaaccatttttatgaagcaatcaaagaggcaatggcaagctgtacccgccgcgctgaggaagtaggtcagaattaaaaaatccatctgcggtattctatgtatgggacgttaattccaagaggaattcgggagtgaatttgcgaatatggataagaagattaaaataacaggaactgatataggcataatatgctcggtattagggtgcgcagcaagtgccgttgtaattgtactggaagagaataaatcgattggcgccatacttttgctttgttgtattgcgagtttgatttctcagtttgtacttaaaaaacggaagtaaaaaatcatcaaagaaccggacgcccgggcaaagtgctgaccggacagcagcgagggcataatttgtccctcccgttcatatattcctgtatgacaaaagacgttgacaggaacgggagtgctgctatgaagggtgttgttttatctatcccgaacgcgggaatcaaaaagacggatgtgacgtactatctcaaacgctatggcgtgctcatttttttgggacttgccttggtaattgggatggtattcgggtccttaagcgccgggcaggcggacgaacagatggttaaaagccttgatttcctgttcatcacgaattttaaggcaaggcttgaacagacgcttttcctcaccttcgccgcgtcgcttacctcttactttatcttttacctcatacaatttttgttggggcttacagcgtggggcacggttatcatgcctatcgcctcatttttcaagggctttggaacgggcttatgcgcgggctacctttgcggcgcgtatgggctgcaggggcttggcttttacctgctgatgatgctgcccggcgcgtttttgtcgtcggtcgcgctgctgctgcagggaaaagaggcgttttatttttccaagacgattctttacacgctgctgcccgaccgcctgaagggcaaaaagtacgcgccgccacaatttgtgcagtacctgctcaaaagcagctatttccttattttaacagcaatggccgcgggtgtggacgtattgctttccatgtgcttttccggcatctttcattttacataaatcctggacggttgtatcagggatagtttccttttctggcgcgatatgttaaaataacagggaagttcaacgaaacggagaattctaaatggccttaaccgatacaaaaacaacagccaggcgcagtttaggcgagctgtttgcctgcctgttcaaaaaatacccgaagctgctcatcgcaaacctgctgtttgcggttccgcttgccgtgtccgcgctgattgtgtggctgattggcgcgtatgtcatgccgctcaacatttttttccagctattgccgctgcttatctgtatgccgttttacgcgggcgtcacgcaggtcacacgggagctggtgcgcggcaagaagataaagccctttgagacctttatgaaggggctgaaaaacaatttccggcagttcttgattcacggcgtgattatgtacctggctgttttgattgattatttttccatcgtgttctattacgcggcggcaaagaccaacgggatgttttatttcctgttcgggttctgcctggttgtcatgctgtttttggtgttcctgtttttctatgtgccgctcattacggtcacgattgaccagaagatgcgccatatttacaaaaacgcggcgcttatggcaatctgggagcttccggcaaacctgtgcgctctgctgggaatcgtcgttctgacagccgttatcagtacaatttttatgctcacgggcagctacaccgccaaccttatcatcgcgggcgtgcttgccgttttggttgttccggcgtatgtctcgacgattatcaactattttgctttcccgaaaattgaaaaggtcctgattttagggcaaaaggaagcggaaaagggcaaagagcacgacgaaagggaagcgccctcccagtcgcttgaggatgcgctcgaagacgacccggaggcggaaagcttacttcgggagaaggcgaaggggagcgaggaatatgtgttccacaacgggcgcatgattaagcgctccctgctcgaagagtactacgcgggcgaggcggagcaggacgacgaataacgattggagcgggctttacaatccgctccttttttgcgtatgtcagccttcccgtgcctttataccgcaatggaggagccgcgttccgagcgttaatacatcctgcgtgtgctgggctaaataatcctccagcctttgcttgtattcttcggtaacggccggggagtagagcgcgtcctcctttttctcctcttctgcaaattgttcgattgcgtatgcgtcgctcaacaggtcaatcagcgtcaggcggaattcctcatggatttcattcgtgttattacgcataagtatcatcctcttgaaaataaattttaaccttatagagttaaattttaaccttataagggttttttgtcaagaagtttctaactctttattgatattttttcactttgcaggtatatttttaattattaaagagtgagtgaaggatttttatgataaaaaactatataagacaccgtatggcagataagcaaatttgtgatattactcagttaatagaactatcaggagtaagtagaaactcaattaacaagttataccgtaacgtaaacgttgaatcgttaaagatagagacgttaatgcgtttatgtgacgctttgggttgcaatttatcagatttagttgaataccaaccgaaaaaatctaataaacaaaaataaaggcggcgcttatgcgccgcctttatttttacaaacattctgtttcttggatttcttcataaaactttctatgttcaatcaaaagggaaaaacaatccgctgtttttcccttttgtaaacccttttcgtcggtacaagggaaccctttcgatgggttcccttacggcttacgggcggcgaagcatcgcgccgccccccgcctatccctccgcagccgattcaaggagcgaagccccttgaaaatccccctggaagaaaacggctgcaccttaattgaattaaatcgtgtaggaaaacgtagacggtaaaaaagtatacaaagtatctcacttacgaagtactccgcgcgaaggcgcggcgcaggaacgtcccgcagtatctgtgctacgcccccagacataaaacgaggaacggcatggtttctatcgtgtggggtttgtaaggggcgcagccccttgctcggctggaaagggtcaagggaaaacctgcgacgaggttttcccttgtcggcggaaaggtgacgggcgtcaggatgccgggaacaatgcgccaaatcatgggcttttctggctctggcttcgttatcgtcctccgaaggcgcaagccttcgttcgtcctctgcctcgccataaccgataaaagcctcatgatttggttcgaagaagtttgaaaagagaaagctccgccggttgcaagcaaagcgaacaagccatgctggcgcatggcgcgtgagtattgcgcagatagcggtggagatggccttttcaaaccgcattggctccggtaccctgatgccctgaaaagagggaaaccgccgaaacggtttctcctcttttgattaaacatataaagttttatcaagaaacccaagaaacggcacgttttaaataaaaagccatgaaatggaacgtttcaatatagagaggggagaacagccgcaactgttctctcccctttgattaaacatataaagttttatgaagaaacccaagaaacggcacgttacaaaaaagaagtgggaaccatcgaaatggttccccgcctttgattaaaacataaaaagttttaaatttataaacaagaagatttataaacaagaagcagaatgcttcaatcatagttcactgtgccgccaagctgaaagtccggcggcaaaaacggaacacgcccggccttgaactcccgcccgttcaaataatcgagcagcccgcattcctctttaaagtcaaaaataagcttatacgaataaagcgcctggtaggggaaggggctgccgctgttttcgcgcctgccgtacttccggtcgccgagcagcgggtgtccgattgacgccaggtgcgccctgatttgatgagtgcgccctgtcagaagctcaatttcaagcaggctcgtattatccggcagctcttccagcaccgtatagcgcgttttgatttcctttgagctgtccgtttccttagcgcgcacctccacacggtttttcttttcgtccttgaccgcatacccggaaagcataccgctttttttcttcatgcgcccgtggacaaggcacaggtaatactttttgatttccctgtttttcatcttcgcgtttaaaacgcgcagcgcctgcgcgttcttcgcgccaatcacaagcccgcccgtgttgcggtcaatccggttgacaagcgcaggggcaaagctgttttctttttccgggtcatactcctttttctcgtacaggtaatgcttcagccgggaaacgagcgaatcaaaatggtaattttcgtctgggtgaacaatcagccccggctttttatcaagcaaaataatgttttcatcctcatatacgatatcgagctttaccggcgcctttagaaagtcgtagtgccgctcctgcttcgcctcaaaaaattcatcgcggatataaagcgtcagcacgtcgccttcagaaagctgtgtgtcggcggtacattttttaccgtttaccttaatatatttggtgcggatgtatttatataaaagcgatttcggcatcgtctggaaccgcttctgtataaatttatcgagccgctggcccgcgtcgtttttttctatcgtcagtgtccgcatggcttgccctccaacataatgctcgccgttccttttacagctgtgcgcggtaaatccgggattcttccccccacgggtggtacccctgcgcaaaatacgtgaatccgtaccgctcataatatcccacatggtccgtgcaaagataaagcgcttggaatcccgcgcggcgtgcgtccctttttgcctgttcaatcaaaagcgggccgtatgcgtggccgcggtgcttttcttcaatatacagggcgcacagccatgggtataaatccatacggctgataaaatcgttcgtaataagccccgcgcagcctatggtttcatctccatgctttaatagataccattgcggcaggggggcggcggcgtcagcacagtgcgaaatacagtctttatataccataaggctctcttcgttcgaccatttctcctgaaaataacggattgcctcttccgtgatttcggggcagtcacgtaccgataataattccattgcgcattctccttatacagcgggaaattgctcctgaatcatctgaaaaaagccggacgccacagcatccggctcatttgcagttttgcctgaatcagtcatccatttcccagttgtgccagacattctggatatcgtcgttgtcctccagcatatcgagcagcttctgcatctttgtgacctgctcctcgtccgcaagcttcgtataggtgctcggcaccatttccacctcggcggatgcaaaggcatagccctttgccgtcaaatcaccgtttacgccggaaaagtcctccggctcagtgtaaatttcaaaagcgtcgccgtccgcctggaagtcggaagcgcccgcctcgagcgcgtcctccatgaccttgtcctcgtctaaatcgcactcctcgcggtcaataatcaaaacgcccttctgcgagaacataaacgacacgcagccgggcgtgcccatattgccgccgaatttgtcgaaataatggcgtacgtcgcccgccgtgcggttgcggttgtcggtcagcgcttccacaatcaccgcgatgccgcccgggccgtagccttcatacgtaattgcctcgtactcgttcgcgccgccctcgccggacgcctttttaataatgcggtcaatgttttcattcggcacattgttcgcctttgccttggcgatacagtcgcgcagcttggagtttacagccgggtcggcgcttccgccgtcacggacggctacagcaagctccctgcctatttttgtaaaaaccttcgcccttgcggcgtcgtttttaccctttttctgtttgatggtactccatttattatgtcctgacatatatgttatgcctcccgcagataatttttacagcttattctatcatatttttttcctgattgcaacagcgcatccccagtgtgtccccggtgttcccggcggggaaaccgcaggaaggaacttgcaattctcaggctgaaatgctaaaatataatgaattgtaaaaaggacgtttgcgtcttaaaaataaattggggaatgaaacgcatgataaagagcatgacaggcttcggaagaagcgagcagaagataaacggcagggaaatttctgttgaaatcaagtcggtcaaccaccggtattttgagtttaactgcaaaacgagcaggggctacgcctttcttgaagagaaactcaaggcgtatgtccagcagcgtgtgtcgcgcggcaaaatcgatttatacgtctccgtcgtctgcgcggaagaaacacaggcaaacgttacgttaaaccacagccttgccgcgggctatgtagaggcgctcaaagaaatcgccgcggcctacggcgtgcaggacgatatttccgtttcctcagtcgcgcggtttacagacatcttcaccgtccacaaggcgcaggaggacgaggacgaggtctggcagagcgtgctccccgtgctcgacagcgcgatggaaagctttatgaatatgcgcagggccgaaggcgcgcgcatgaaggaggacgtgctgggccgctccaaaacgattctttctattgtggagcaaatcgacgagcagtcgccgcagacggtcgcgcagtaccgtgaaaagctcgaggaaaggcttagagaactgctcgagtccgcctcagtcgacgaacagcgccttttgacggaagcggctatctttgccgacaagacggcggtggcggaagaaacagtccggctgcgcagccacttctcccagcttgaaaggtttatggaggccggtgagcctgtcggcaggaaaatcgactttatccttcaggagatgaacagggaggccaataccatcggctccaaggtgcaaaacgcgccgcttgcgcatctcgtcgtcgaaatcaagtcggagctcgaaaaaatcagggagcaaatccagaacatcgaataaaggccgtatttacaggcgccttaataaagaaagaagcaaaaagtaaaagacggatgtgatgtttatgaagcttttgaacattggctttggcaatatggtgtcgggcgaccgcattatcgcaatcgtatctcccgacagcgccccgattaagcgcatcatacaggacgcgaaggaacagggcatgcttatcgacgcgacctacggcaggcggacgaagtccgtcgtcgtcatggacagcgaccatgtcgtcctgtccgcgaagaaccccgaaagcctgggcaaccgggcggctctggaggaggtgacggagcatgattgacaaaaaaggcctgctcgtcatcatttcaggcccttcgggcgcgggaaagggaacggtcgtcaaggagcttgtcaaacgaagcgataaaataaagctttccgtctccgcgaccacgcgttcgccgcgtgtgggggaagcgcacggcagggaatatttctttattacgcgcggcgattttgaacagcgcataaaggacggcgcggtgcttgaatacgcgcagtactgcggcaactactacggcacccccaggaaatacgtggaggagcagtgcgcgcttggaaacgacgtcatcctcgagattgaggtgcagggcggcaggcaggtgaaaaagctctgccccggcgcggtaagcattttcgtcgtaccgaagtcgtttgaaatccttgcccagcgcctgcgcggcagggggacggaggacgaggaaacggtgcgccgccgcctgcaaacggcactttccgagctggaacaggcaaagctttacgactacattgtaatcaacgacagcctttcggactgtgttgacgatatactgggcatactacgctcagaaaaaaacaaaaccggcaatatgctgaattttataaaggaagtgcttgataatgcgcagaccatctgttgacgacatgctcaataacaaaataacaagatacgcgcttgtgattgccgttgcaaaacgcgcaagggaaattgcggcggaatttgaaaaggagaccatcatcacggacgaaaaacccgtgctgctcgctatcgatgaattcaagcagcataaatacagcatccttgagccggaagtcgatgactgactccttccggcttaccgcctgtgtggcggtagaaaattccgtttaccattttgacaaagcattcagctatcttgttccggaaggccttacatcctgcgtcaaaacagggtgcagggttcttgtgcctttttccaggaacaataaaaaaaagcagggctttgtgctttccctgtcccaaaccagcgaggccgcgggccttaaggagatttcctccgtgctggacgagcgcccgctgctgaccggcgagcttgcgcgccttgccttttttatgaaggagcgctgctactgcacgctttacgacgcggcaaaggcgatgctgccggcgggcatcggctaccgggtgacgaccctttacagcgttgccgggggcatagatgaaagcctgcttgacgaagaggaagcgcgtcttgtagattgtataaaaaacaacggcggctcaatgaaaaaggagccgctttttgaagcgatgggctacgcttcagacaacccgctgcccgacagcatggcacggcgcggccttctggacaaatcggacgacgcggcccggaaagtcggggacgcgtccgtcaaaatgctccggttgtgcgagacgccgcctcaggctgtaaagacgaccgcaaagcaggaagaggttttaaacctgctgcgcgcggccggcgccgtttccgtcaaggagctttgctattacacggggcttacctccgcggtggctgacgcgctggtgaaaaaggggcttgcgcaatacttcagcgcggaggtcctgcgcgcgccgcgccgtgaacccgcatccgcacagaaaacggagatttcccttacaaaagaacagcaaaacgcctacaatggccttttgcgtgaataccgttcaggaaaggcgcgggtttccctgctgtacggcgtgaccggttcgggaaaaacctctgtcttcatgaagctgattgacgaggcggtgaaagacggcaaaggcgttatcgtcatggtgccggaaatcgcgcttacgccgcagatgatttcgctgttttcctcccgttacggggacgacgtagcggtgttccacagcggcctgtccctggggcagcggctcgacgaatggaagcgcgtgcgccgcggccttgcgaaaattgccgtcgggacgcgcagcgccgtattcgcgccgtttgaggacatcggcttaatcataatggacgaggaacaggaatatacttataaatcggaatctacgccgcgctaccacgcgcgggagattgcaaagcggcgctgtgtcgaacacggctgcctgcttctgctttcgtcggccacgccgtcggtcgaaagctattactttgccaaaaacgggagctattcccttcatatactgaaaaaccgctacggcgccgcaaagctgcccgaggtgctcatggcggatatgaacatagaacaggagcagggcaacacgacgggcttttcctccgttttattagaagggctggaggaaaaccttgaaacggggcggcagtcgattttgctgctcaaccgcagggggcacaatacgtttgtgtcgtgccgcagctgcaaggaggtcgtcacctgcccgaactgctcgatttcccttacgttccattcggcgaacaaccgcctgatgtgccactactgcggctactcgcagagcattgcagacgaatgccccacgtgccacagccatagcctgcgttatgcgggtatgggcacgcagcgcgcggaggcgtctttggcgcagctgcttccgcaggcgcgcattttaaggctggacgcggacgccacgatgtcgaaatacgcgcacgaaaggctgctcgggcagttttccaaaggggaatacgacatcatgataggcacgcagatggtggcaaaggggcttgatttcccgaacgtaacgctcgtcggcgtattgaacgcggaccagatgctgtacggggatgatttcaggagctatgagcgcgcgttttccctgctgacgcaggtggtcggacgttccggacggggcggttattccgggcgcgccgttatccagacgttcacgccggaaagccctgttatccgcatggccgccatgcaggactacggccgcttttttgaaggtgaaatcgcgctgcgccgcgctatgctctatccgccgtttgcgcagatatgcatgattggctttgtcggcggggatgataacaagacataccgcgcggcaattgcctttacggaagcactctgcgaaagggcgaaaacgcggcatcccgatatgccgcttcgcgtactcggcccaactgcggccatggtcaaaaaggtgagcaacaagtaccgctacaagctggtgctcaaatgtaaaaacgacaaaagcttccgtgaaatgctctccggccttcttgtcgagttcggcagggacagggcgtttgcggacgttacggcctatgccgatatgaacccagactcaatactataaaaggatgatagatatggcaatcagaaatattgtaaaagaaggcgacccaatcctcaataaagtaagcagaaaggtcgataagttcgacgagcggctttggacgctcattgacgatatggccgaaacgctccacaaggagcagggcgcggggctcgcggcgccccaggtcggtattttgcgccgtgtcgtcgtaatcgatgtcggcggcggcgtcattgagcttgtcaaccccgaaatcatcgaaaaaagcggcgagcagcacgaaatcgagggctgcctgtcctgcccggggcaatggggtattacaaaacgcccgatgtttgtgatggtcaaggcacaggacagaaacggcaaggagtttaaaatgagcggcgaaggcctgcttgcgaaagctttctgccatgaaatcgaccatcttgacggaatcctcttcaagcagcacgtcatccgtatgctcaagccggaggagctcgagggctgattttacagaaatttcatggaattgtgacacaggagtgatacaatgaaggtcgtatatatgggaacgccggatttcgcggttgcgccgatggaaagcattcttgcggcggggcatgagattattggcgtttttacgcagccggacaagccgaagggcaggggctacgagcttgcgccgccgcctgtcaaggtctgcgcgctggcgcatagcctcaccgtataccagccgaaaacgctcaaggacggagcggtctttgaaacgctcagggggcttcatcctgacgttattgtcgtcgcggcctacggcaaaatcctgccgggggaaatcatccatttgcccgaatacggctgtatcaacatacacgcgtccctgctcccaaagtaccgcggcgcggcgcccatccagcgctgtatcctcgatggggaaacggaaacaggcgtaaccgtgatgtatatggatgaggggctggacacgggcgatatgcttataaaggaatccacgcctatcggcccggacgaaacggcgggcagcctgcacgaccgcctggcacaaatgggcgcggcgttaattgtaaacgcgctcgcgcttctttcaaatggcacggcgccgagggaaaagcaggacggcagcctttcctgctacgcttccatgctcgataagtccatttcaggaatcgactggaataaaacgaaccgtcaggtgcataatcaggtcagggggcttaatccgtggcccgttgcttcctccgccctgaatggcaaaacggtcaaaatttttaaaacggaatgcagcgcgaaacaaggggagcccggtacggtgctttccattgaaccgctaaccgtcgcctgcttagagggagcggttgaaatcctggaattacaactggagggaaaaaagcggatgaacgccgctgattttctgcggggacataaaatattgccgggcagcaggttcggctgatttggcataatgcatatttgaaaggtgtgaaaggctttgccgtttttctattggttcgactggacctacatggtttttatccttccggcaatcatcatcacaatgattgcgcaggtacgcgtcaattctgcttttaacaagtattctaaaatacaaaacctgcacaatctcaccggtgcccaggccgcgcagcgcgtgcttgccacccatggcgtgagcggcgtgcagattgaacatgtggcgggtaaaatgaccgaccacttcgacccgcgcacaaacgtcatccgtttgtcggacagcgtttacggctcgaccaccattgcggctgtcggcattgccgcgcacgaagcgggccacgccgttcagcacgcgcagggctacctgcccaataaaatcaggggcgtgctcgtcccgcttgcaaacgtcggctcgagggtttcgtggattttgattatcatcggcctctttttgccccttcaatacgactgggtgctttacctcggcatcctgttttacgcgctgtccgtcttatttaccattgttacgctgccggttgagttcaacgcgagcaaacgcgccttgcagacgatagacgaaacgaacatgcttatgggcgaggaatacgcgggcgccaaaaaggtactttcagccgccgccatgacatacgttgcggcggccttcaccgccatcatgagcttactgcgccttttaacgattgccaaccggcgcagcagccgctgatatggggcaggcaagaaaggcggccctcgaggcgctgttacgtgtagagcgggagaacgcttattccaaccttgcgcttagctgggccgttaaaaagtacgcgctcgacgggcgcgacgcttcgcttgcgggcgctctcctatacggtgtgctcgaacaaaagctcctgcttgattatgtaatagggtcttactccaaaacaccgctgaaaaagcttcagccagaggtcttaggtatcctgcgtatgggcgtttaccagcttttgtttttggacaaggttccagacagcgccgcggtcaacgaatcggtaaagcttgcgaaatacaaaaagcttttttccgcttccggctttatcaacggcctcttgcgcgccgtttcgcgcgcgcaggtcaaatatacgctgcccggtgaaaaaaaggattggctctcctacgccagcataaaatattcctgtccgaaggaaattatcctgctctggcagcgtgcatacggagaggaaaccacgcggtccctcctgaaaaccctttccggcaggccgccgattacggcgcgcgtcaacacactgctcaccagccgggacgaattggcacggaggctttcgcgggaagaggggattgaggcggctcccgttcctttcctgcaaaacgcgctggcccttacgcgcacgggggcgattgaaagctcacaggcttttatggacggcctgtttacagtgcaggacctatcgtcccagcttttatgcgagctgctttcaccaaagcccggcagtgtgctttcagacgtttgcgcggcgcccggcggcaaaagcatgaactgcgccatgcatatggaaaaccgcggcgaaatttatgcatatgacttatatgaacataaaatttccctgatggagcaggcggcaaagcggctccatattggtattgtaaaaccttcggtgcgcgacgccctctgtgacgcgccccttgtcccgtctgattacatcctctgcgacgttccgtgttcagggcttggcctgctcaggagaaagcctgaaatccggtataaaaaggatttggggctcgataccctgccggagcttcaataccggattcttgaaaactcttcgcggtatctcaaaaaaggcggaacccttttttactcgacctgtacgctcaatcccggagaaaacagcggggtagtcaggcgattccttacaggtcatccggattttgcgcccctgcccctatccattccaaaagggatacgcaggggaacaggggaaaatgaaaacgagcttacgcttttccctcatgtgaacggtaccgacggattctttatcagcgcaatgaaaaggatgtgatcctatgcttttggacatcaaatccatgacgccggaggaattggccgaatcccttatgcctttggggctcaagccctaccgcgcgcagcagatattccagtggctgcatgaaaaatctgtcgagcgctttgacgaaatgctcaatatcccgaaaaacacgcgcaaaaagcttgaggagatttattacatttctgttgcatatattgaaaaaaagctgatttcttgttatgatgatacaataaaatatttgtaccggctgcacgatggaacctttgtggaagctgttttgatgagctatcatcacggttatacgatgtgtatttccacgcaggcaggctgtaaaatgggctgcacgttctgcgctacgggacagggcggctttgagcggaacctgaccgccggcgaaatgctttgccagatacaatcggcgcagaaggacaaccatatccgcatatcgaacgttgtgcttatgggtatgggcgaaccgctcgacaattacgataacgtgctgcgctttttaaagcttgtttccgccggcgagggcttgaatatcgggatgcgccatatcacgctttcaacctgcggcctagccgataaaatttacgatttggccgacaggcgcatgcagattacgctttccgtttccctgcacgcgccgaacgacgcgcttcgcgcgcagacaatgccggtcaacaagcggtttccggttggcgaggttttaaacgcctgccgttactacgcgcaaaaaacaggccgccgcgtcacgtttgaatatgccatgatagatggcctcaacgacagtgccgaatgcgcgcaggagcttgcgggcaggctaaaaggaatgctctgccatgtgaacctcatcccggtcaatacgaccgctggcgctccctatcaaaaaagcgggcatgaaaggcttgtcgctttttgtaatattttagaaaaaaacggcgtgaccgctacggtcagaagaacgctcggcgcggatatcaacgcctcatgcggccagcttaagggccgccatataaaagaaaatggatgaaaccaccctctttgaaaaatactaaatgaaggaggaaacagcttggaggtatatttaaaaagcgacatcggccttgtcaggtcttccaaccaggacgcatgcaaatgcgggatatttcccgaccgttccgtctgggccgtcgtctgcgacggaatgggcggcgccaacggcggcaacgtcgcaagcgaggttgccgttgaaacggtaagcggactgcttgagaagaattacaaggagacgcttacggacgaccagactgttgaccttctgacgagcatcgtccagaaagcaaacagcaagctatataaaatgcagaaaaaagacgcttccctgcgcggtatgggcacaacgattgagcttgcgctcataagggacggggcagcgcatattgtacatgccggcgacagccgcgtatacagtatccgcggcaataaaatcaagcagcttacgaccgaccattccgtcgtacaggaaatggtggaaaaaggggagataacgccggagcaggcgcgcgtccaccccaataagaattatatcaccagggcgcttggcattgtaccgcagattcatctggactatatcgaagcgccgttcgagcagggggatatcctcctgatgtgctcagacgggctttccaattatcttacgcccgcggagcttgtaaggctttcgcttgaaaatgaaggggaagcgtttacagacgcgctggtcgaaagcgcgaaagggctgggcggcagcgacaacattacggttgccgtcattaccttttaaaggatgggagtgaagagaaatggataagtattcaggaaaaaaattggatgggcgctatgaaatacacgagctgataggcgtaggcggcatggcgatggtttaccgtgcgtacgataccatcgacgaccgtgtcgtcgcaattaaaatactaaaggatgaatattccgcaagcgaggagttcgtccgccgctttaaaaacgaatctaaggcgattgccgtgctttcgcacccgaatatcgtcaaggtgtacgatgtaagcttcggcgacatgattcaatatatcgttatggaatacatcgacggcattacgcttaaggaatatattgaaaaccagaaggatatcggctggaaggaagcggtgcattttaccgtgcagattctgcacgcgctccagcacgcgcacgaaaaaggcatcatccacagggatatcaagccgcagaacatcatgctgctgcaggacggtaccattaaagtaacggattttggtattgcgcgtttctccagtatggagacgcgtaccatgaccgataaggccattggctcagtccattatatcgcgcctgagcaggcgcgcggagatgtgacggacggcaaagcggatatttattccgtcggcgttatgctttacgaaatgcttacgggcgtactgcccttccaggcggacaatgccgtttctgttgcgattatgcagctccagtccaacccaaagcctccaaagcaaatcaatccctctattccggacggcctggaggaaattacaatcaaggccatgcagaaggaccccgcaatgcggtaccagtccgcggtggccatgctcaaggatattgagctgttccgccaaaacccgagtatccgttttgaatataactacatgagcggcgacggcgccacaaaaattgcggatgccatcaaggatgtcaggaaaccggctgacagccgctacggcgaccagtacgactaccaggaggaagctgaaaaaaagaaatctcccgcaaccaacgtgatagtcggtattgtcattgcgtttgcgctcgtggcaatcgtctgcggaatcctggcgtttttccaggcgtgtgacggggacacgaaaaacgcggtggaaatccctaattttgttgggatgaacatcgacgacgtcaagaataacccgaagtataaattcacctgggacatccagaactcctttgacccggaccaggcaatcggcacgattttgaaacaggacccggccccgagcaaaaaaaccatcagggagggttccgtcatcacgctgacggtcaacagcaccaacacgctcgtgtctgtcccgtatgtcaacgaaaaaggggaagaaaccgcaaagcagctgcttgaacagaaaaacctgaaggcggaaattatttatgtgctcgatgaaagcaccagcgagggcatggtgcgcgatacctctcccaaagcgggagccgaggtagaggttggctctacagtcaaaatttttgtgagcaaacaaaaggacgcgacaatggtaaaggttccgaatgttttggggaaaacgcttgatgaagcgaaatatacgctcgaaacggaatacggctttgtcgtcgattttgaatacaatgtagaggttgataagccgaaggacaccgttattggccaaagcccgctttacgacgccgagctggaggctggctcgaccgttaagctaatcgtggcgcaggggattgaacgcgagtccaccatggccatttatgtggatcttccggtggatgtggaagacaccgtttacctgcgcgtaacagtaaacggcgttgttgacgagacatattcaaaatatgtcgtcccgaaatataacagcacctataccatagaggtaaagggctcaggtaccgccgccatcgtagtggatatcgacggaaatacctatcgggaatatactgtaaacttcgatacaaagcaggtcgatatccagaaacacgattatgtgtatccgacagacccgccgacggagccgccgaccgaatgggttccgcccgtttcctcctctcctgagacggagccagtctatcaatgaggggaattatggacaatttgaacggaatgattataaaattaaccggcggcttctattatgtagaagccgccggacgggtatatgcgtgcaaagcgcggggcgtcttccgcaaccagggggactccccgtgcgtaggcgaccgcgtggaaattacggttcagcctgacggcgccggtacggtggaagccatccttcccaggaaaaaccgcctggtgcgtcctgccgtcgcaaatcttgaccggctgtttatcgtggcgtcggtctgcgacccgtcgcccaatatgcttgtcatcgacaaaatgacggcggccgctgtcagcaaggatattgaaccggttattgtggtctccaaaaccgatttggaaaacggcgggagcctgaaagaaatttatgatacggcgggcatccgaaccgtatgcttttctgcggaagacaactcgggcgccgatgaaatcaaatcgcttctgaccggctgtgtcgctgcttttacagggaattccggagtggggaaatcgacgcttttaaacagcgtgtttccgcatttatcgctccagacctcccataccagccaaaagctcgggaggggcaggcacactacaaggacggtcgagcttttcccgacggacggcggctatgtagccgatacgccgggcttttcctctgtcgatatgcagcggtatgagctgattaaaaaagaagacctgccgtactgttttccagaattcagcgattatctgggcggctgccagtttacctcctgcgcgcacgttaaagaaaagggctgcgccatcaggcaggctgtggaggacgggaaaatccatccgtcacgctttgcaagctatgtcgccatgtatgaagaagtaaaagatgtcagggagtgggaattaaaatgaaaaacaggtgcgttgtcattgccgcggctcccaatccagagataagctttatccggcaaagcataaaaacggacgacttcgtcatctgcgcggacgcaggttacgaagccgccttcaaagccggtattgaacctgatttaattgtaggcgatttcgattccgccaaaaaacccgagacaaagcttccgctgattacgcttcccgtacataaggacgataccgacacggtattcgccgtaaaggaaggcctgaaaaggggattccacgaattccttttgctcggggcgcttggcgggcgcattgaccatacgttcgcaaatttcagcgtgctcgaatttctgcacgctaacggcgcgcgcgggctgatttccaacagccgcgtacagatatgctttacagcgggggaaacgtgtacctaccgcggtaaaaatggacatacgctttctgtctttccatatggctgtgaaagctgtacggttacgcatcacggctttgaatatgagctttcccatcaggaaatcctatcttcttttccactgggaatcagcaatgtcgttacaagcgatacggcgaggattgaattccatgacggcaaggcgctcgttatgctgtttgaagaaaaaaacacccacgcctgatatatggctttactggcacggaaatcttgcggaaatgatgtcccagtcaattagcttgagccagttatcgatatacctttcccggtcgaaccggtattcacggaaaaacgcgtgttcccaaacgtcgcaaagcagcagcgggttcaaaatggaaagcggcggcgtatcctggttcggctcatttatcgtttgcagcttacatgcggcgttgaataaaacccaggtattgcctgagccgaaaattgcgagcgcatacgatttcagcagggactcaaaattgctgaaggagccgtatgtagcgttgatttcccgcagcagggagccgctcggcctcgtacctcttttttcgctcatactgctgaaatacagctcatggttgaatacgcccccggcgtaatttttaatatcggtgcgaatttccgccggaaatgtatcggcatatacgacgagcgcctttaagctccagtcctggaactgcgggtaattggacagcgttttgttgagcaggttgacataattctgctggcactgtgtatgatgcgcgtatacttccggctctgagagatagggttccagcgcgttatacgcatacggaagcggggtgagtgtaaacgggtaatgctctgccatattcgttcatcctttcggcaagttatatcagcgcattgagggcgctgctttaaatatgaaaaaataagctacggtcttattttatgcggaaaacattagggtgtgacaatcttggaacaatataaacaggcggaacaaagtattgttaaaaaatataaaaaggcaatatggaaccgttttatcggcggcatcaaggattacaggctgatagaggagggcgaccgcattgcggtctgcatctccggcgggaaggattccatgctgcttgccaaatgtatgcagcggctgcaaaaatacagcgaattcccgttttcagtaaaatatattgtgatggacccgggctataacgaggcaaacagaaagcaaattaccgataacgcggcgctgcttggaataccggttgaaatctttgacaccaatattttccgtgtggtcaaatggggggaaggctctccgtgctatctgtgcgcgcgtatgcgaagaggccacctgtaccgcgcggcaaaggaagcgggctgcaataaaattgcgctcggacaccattttgacgatgtgattgaaaccatactgatgagcatgctgtacggaggggaaattaaaacgatgatgcccaagctccacagcacaaattttgaggggatggagctgattcgtccgctgtatctggtgcgggagcaggatatcatctcctgggcgcgctataacggccttcaatttatccgctgtgcctgccggtttacggaaaacctctcaaacgaagacgctttgggacactcgaaacgcgcggaggtcaaacagctgcttgcggaattaagaaagcgcagcggttatatcgacagaaatattttcagcagcgtgcatcacataaacctttcgacggtaatcgggtacaaggaaggggaagacgaaccggtacatacatttttggaaacttatgagagggattcacagctatgattttaaagattcgctcggaaatggacgacagcaacaggggatattatgccgtcgcgtttggcggcaaaactaaatttatagataaagactcgccggaggtttgctttgaatgtaccccggccgctgttcattatgtagaaatccgccatcttacgcagggaaagatgacgccgctcaaatggggatggttttatttaagggaaatcattttgtccattttattcttttttacgctcgaccaggcgcattggtcccaaagggcaatcgctttccatacaacgaagaaaatcacattcaatccagcgccgaaggaagaagcgctgttcgaaatccggctcaaaaacgaaggcttcgaccgcaaaacagggaagctgccgcttcccaacatcctgcttcgttccaactgcgccgttttaaagcaggaaacggcttacatgccaaatatggacgatataacgctttgttttatcggctgcatcataaaatacgcgtttcccgcggctgttgccaccgcgcttttggtttggggcatcgtatcagccgttttctcagcaaatatcggctggctggttgtattctcatgcgttcaggcggcggttttggcgtccggtataccatacctttaccggaatatcaaaacaaggaggcaaatgctggaggaaattaaaaacaggaagctttagcggcctgtttcagcagggataggccaatggataacacccttggcgttcggcaaaaggagctgattaccgtgggcgaattgattaaattttccaatagggaagaattcaggagctggctgtccgaaaattgcaggtctgacgccggcgtttggctgctttttggaaaggcgggcgggcccaaaacagtgaaagcaagcgaagcgctggaagaagccctctgctatggatggatagacgggcagatgcagcgtatcgatgataaaacctataaaaaatacttttctatgcgcagggaaaacagcagttggtctgaaaaaaacaaagtgctggcagtaaaactggaaaaacaggggcgtatgaccgaatatggcagaagaaaaatagaagacgctatgaaaaacggccaatggaacgcccaaaagcctccggaagtgacagaggaacaggtaacggctatatctgagctgctggaagaatacgaacccgcatatacaaattttatgtctatgcctccatccgtcaagaaaacatatacgaaggcatatcttgatgcaaagacagacgcggggcgtacaaaacgcttatcctggatggtggaacggctcaataaaaactggaagccgatgtgagccggtttccgttcgtttaagcattattaccggcatattgggaagaaaagaggtggcggcagaattgaatcacgaaacgcagcgcctaatcctgcgcccctggcgggagagcgacgcgcaggcgttatatgaatatgcaaaagacccccaggtagggccggctgcgggctggccgcctcatacaagcgtagaaaacagccgtaaaatcatcagggatgtgctttccgcacccgaaacctacgcggtcgtgctgaaagagacagacaggcccgccggcagtatcgggctgatggttggcaaacagagcagtctcggtatcggatgtaatgaaggggagctaggctattggctcggggttccatattgggggcgcggactgattcccgaagcggccatggcgctcatcaaatatggttttgaaggcctgcggttaacgaaaatatggtgcggctatttcgagggcaatgaaaaatcgcgccgcgtacaggaaaagtgcggctttcgttaccatcacacaaacgagggcatcgaatgtccgctgatgggggatatcaggacggaacacgtcacctgccttacaaaagaagcgtggaaaaagcgaatactgaaaaatgagatggaacgtaaacaagcaaagcgttcaatttaacttttttgggattcaaaataaatataaaaagggcggcatggcttaaaagaccatgccgcccttttgtccgttttatcaaacctggtccgtcttgacggaatagcccgcatccgttaccgcgcgaataaccgcctcgtcgtcgatatagccgtttgcacttaccgtcgccattttactgtcgaggtctaccgttgcggttattccgtcgagcgcgttgagtgcctgctccacgcggctgctgcaatgcccgcaggacataccttctataatatacgttttcgctgccatctttgtttcctccgtttccaaatcgattgttttgattatatcatggatttctgtagaatttaagcgctttgcgcggctttttttgtgcttttcaggccggaagcggaatagccgcagcgcgttcatcacaacgcagacggagcttaggctcatcgcggcggcggcaaacatcgggtttaatagccagcggaatacaccgtaaaacacacccgcggcaaccggaatcccaagcacattatagataaacgcccaaaacaggttttcttttatattgcgtaaaacggccttgctcagcataattgctgtcgcgccgtcccgcaaatcgcttttcatcaggacgatatccgcggactcaatcgcaatatcggtgccagcgccgattgcaatgcctacgtcggcgctggcaagcgccggggcgtcgttgatgccgtcgccgaccattgcgaccctcctgccgtgctttttaagcgcgcttaccaccatttccttctggtgggggagaacctcagcaatgatgttgcggataccgagctgttttgcaatcgcgtttgcggtcgttttgttgtcgcctgtcagtacaaccgtgtcgatgccgagctcttcaaattgtgcgattgcctcgcggctggtggcctttactgtgtctgctacggcaataatgccgagcacccgctcctcgtccgcaaaaaacagcgaggttttaccctcctgcgcgcaggcgtccgctttttcaagcgccgtacttaaatcgatgttcagctcctccatcaaacggcggtttccggcaaaaaacgttctgtcttctatttttgcctcgataccctttcctgtatggtcgcggaaatcgtgcgcgctttgtatttccagctggttatcgcttacgtattcattgatggcgcctgcaatcggatggtccgacggcctttccagggaacccgcgacctggagcaaacgttcttttgacgcgccggataaagggaaaatgtcggtcacgcgcggctttccctccgtaatagtgccggttttgtcgagcacgacggtatcgatgccgtgggccgtctcaagcgcctccgcggattttatcaaaataccgtactgcgcgcccttacccgtaccgaccataacggccgtcggcgtggcaaggcctagcgcgcatgggcagctgatgacgagcacggcgattccggcggacaacgcaaaccctaccgtatggccgagcagcagccagactgcgatgaccaccgcggcgatgcacatgacgaccggaacaaaaatacccgcgattttatccgccagccgcgcgattggggcttttgaggaagccgcctcatcgacaagccggatgatgttcgagagtgtggtatccgcgccgaccttcaaagccttcaccttgataaagccagaggttacgcccgtcgcgctaatgactttgtcgccctcttttttatcgacagggatactctcgcccgtaatggccgcttcgtcaaccgacgccgtaccgtatacaaccacgccgtcaaccggaacggaactgccggagcgcacgacgacgatatcgccttctttgatatcctcggcgggaatttcccgctcctggccattttcctcgataacggcggttttgggggcaagctctatgagcttgctgattgcctcagacgtttttcccttggagcgcgtttccaaaaattttccgacggtaatgagcgttaatatcatgccggccgactcaaaatataaatccatcgcatagccgtgcgcggcgtgcgtatcggctgccgtgataatcataatggtattgaacacaccgtacagaaaggcggcggcgctgcccacggcaatcagcgtgtccatattcgggctgcctttaaagagcgatttaaagccgactgtaaaatatttaaaattaatgacaataattggtattgtcagcagcagctgggtgagggaaaagccggtgtagttttctccgaaaatatctacacctaccatatgtcccattgatattgtaaatagcgggattaaaaaaataacagataggattaggcgccttttcagcttcctgctttcatcggccgatatatccttcggcgatttgagcgccttgccgctttcgtttatcttcgtgttgtagcctgcgccggaaacggctgtggcaatatcgtcaggcgaaaccgcgttttcatcatagacgacgttcatgctgttcgtcatcaggctgacttccacgtcctttacgccgtcaagctttgaaacggctttttctacgtgcgccacgcacgaggagcaggtcatacctgatacgtcaaatttctttttcaaaggcgccacctccgcttgttttcaagggtatcgtaatccaatttcaggaaattgtcaaacagcgtgttgcaaatacaactttgtgaaaaacaaaaaatcctccgtcccgaagggcggaggacctggaaaacataagaataaaagcttatcctgcgtttctcatctgtaatcttaacttgtcagaaatcattgcgatgaattcactgttcgtgggctttcctctgccattgtgaatagtataaccaaaataagagtttaatacatccacatctcctctgtcccaagcgacctcaatcgcgtggcggattgcccgttctaccctggaggaggttgtctcatattttttcgcaacggaaggatagagctgtttcgtgactgcgttgatgatttctggcttttcgacggacataataatagagtcccttaaatagtggtaacctttgatatgcgccggtacgccgatttgatgaagaatttccgtaaccgtcacttccagcgaaatttcgtgtttatccgttttaccctgcaccggcaggcccgttgattggctgtttttattgttgaccagacggacaatgttctgcgcaagctcagatacattaaacggcctcaaaacaaaataagaagcgcccgcagacataatttcacgttcgagcgcagggctgtcgtaagcggaaaggataacaaacataggcttgttctcctttgccgtattcgacatggaatgcagcacgccgataccgtcgatcctagtcataaacaggtcgagcaaaacgatatcgggcttttgcgcgtcaattttttccagaagctcgatgccgtcttttgagcagacttgtacatctataccgtaatgcgcgaaagtgtcgtactggtcccgactaaaatcggcaggatcttctgtaatcagtgctttaatctggttttccatagtttctcccccaagttgtttatttgacggtcttatattaccatattttggtaaattaagcaagcgtttacagcaactttttttcaaaaaaggggaaaatatttttgtaagccaaaattaggcggcaggattctctgttttcgcgtctgcttcggcaaaatccgccagcatattctctgcaaagatgccatagcccttgtcggggtcgttgacgaacacatgcgtgaccgcgccgacaagcttgccgttttgaataatcgggctgccgctcataccctggacgatgcctcccgttttatcaagcagctcttcgtctgtaattttaattaccatatttttggaagcggcgtccttgttgtagtcgatactttcaatttcaatgtcgtaatattttggctgtccgcccgatacggtcgtaataatttgcgccctgcccgttttggcctcctgcttggaggcaacagggatttcctcgtgctgcgcgggagcgctgtccatatagccgtatacgcctgtttcatcgtttgcaatcagcgtgccgattgctgtgctgttgtcgaaatgtccatttagggagcctggcgtaccctttacagccctggtaatgctgtcaagcgttgcgctgacgatatcgccctcggcgagcgtcagcagttcgcctgtatccacgtcgcatattccatggccgagcgctccgaacgcgccggtctggggaatataaaacgtgactgtaccaattcccgcggagctgtcgcgaacccaaaggccgattttataatcgccttcctcgttcgtttcaacgggggaaacgttcagattgaatttttccgttccgcgcatgacctcaaaagcaatttttctgcccctgctttgttctacaatttctatcaggtcttcattgccggaaacagaacggttgttcacctttaatattacgtcgccgacctcaatcccgccctctttcgcgggacagcagctttttccgtttacggtaatgtcgtccgtcttgacgaccataacgccctgcgtaaacattttaacaccaaacggcgttccgcagggaacgacctttacgtcctcgctcaccttgagcgttacgtcctttatcggaaaaatgccgccgagcatcagctttccttcgacctcacggctgttttgcccggacgtatggcttgccgctaccgtgccgtttgacggcgcagcctggagcgacacgcccgggaactgcggacttttcatattctgtaaatccgtcacccggaaatcgtccggaaaataggcggaaaacgcagcgcccgcgccaaataagagcaggcatgcggttgtaagagcaacggtaaatattttaacaaattttttcaaaaccaacacctccttttccgttgctctattacttttccacgctgacgccttatttagattggaaaagagaatcggcagatggatttttggaagcggcttttgctttgagccgctcaagctgcgattatttcctgcttttttatttttttacaaaaattgctgttttataagcgggattctctgtttttaaaattaaaaacagtcacaatttttttgccgcggcatatcctataaataggcggaaaaagggacaagtcccatccgccaaatttatggaggttgattatggaattcagtgcaacaataacgactgccgcagacagcgcccttgaccagcttttgcaacgtgttttagacaacacggaggaaatcaaagatgtcagggatgaactggaagcctttatggaaaggtgtgacgcgctggttataacaggcgtgccgaacagcttccaggtagcgtccgattcgattatccatggtacgaaagccaccctgacaatggcgcacgttccggcgggaactaatattgtccgccaggatggacagcccttatattattacggcacaacggaaattgttcaggcggagccaaacattcccgtcacggtatccgcggaagacttaatcgcgggtgttgaattgacggcggatggaacgcttattgtcaaattttatacgcatcccttatataatctgaaggccagtgtcaataaaaatgaaaaagatattgccgcaattaaaaagttcatcaatatgccctaattaaggcggcttaagcatttgaaatagtccccgtgtttttttaataaaaacacggggacgcaaagctttatgaatcttttcttgcaattcgcatatagatgtggtatatttcttattgtactatttgaattaatacaattaattcaaaaaacaggcacaaaatagaattgtaaatctcggctgtctgtgttactatttttattatgaaaatcgattgggagaggcatatggacaggaaaaacgaaaaaaccgaaatcaaacgggtaaagcccgacccgaagacagggcttaatgacctgcaggtaaacgaacgcctgcatacgggccattataataaggaaagctcgctgcctacaaaatcatacggcaggattgtacgcgacaacgtgtgtacgcttttcaatctcatcaatatcgtgcttgctgccgccgtgctttacgtcgggtcctataagaatatgctctttatgggcgtggtgctctgcaacattgccatcggcatttttcaggaggtgcgggcaaagcgtacggtcgacaggctttccatcatttccgcttccaaggtaaaggcgatacgcagcggctgcgtcagggaggtggacgtcaacgaaatcgtcctggacgacgtgttggagctgcaaaacggcaaccaagtcccgactgactgcattgtgctcgagggcgcgtgcgacgtcaacgaatcgctcttgacgggcgagtctgacgccatacataaaaagccgggcgatacgcttctgtccggcagcttccttgtaagcggaaaatgcagggcgtgtgccgagcatgtcggcgacgacaactatgcctccaccgttttcagcggagcgaagtatatcaaaaaagtcaactcggaaattatgcgtacgctcaataaaatcatcaaaattatttctattgtgattattccggttgccgcgctcctctttttcaatcagctcgatattgcgggaacgaatttccagagcgtcgtcgtcaatacggtcgcggcagtaatcggaatgattccggagggcctgattcttttaaccagtacggtgcttgccgtcggcgttgtccgcctggctaagcataaggtgctggtgcaggagctttactgtatcgaaacgctcgcgcgcgtagatgtgctgtgcctggataaaacagggaccatcacggaaggacgcatggagctcaaagaggtcgtacccgttggggaaagcggcagggaagagattgacagggcgctccaggcgcttacctgcgcccttgaagacaacaacccgacctttgaggcaatcaaggggaagtatccggcggaatcagaattaaaagccacggaaaccgtctcgttttcctctgataaaaaatggtccggcgccgcgtttggaaaacaaggcgcttatgtcataggcgcggctgaatttatcttccgggagattcccgaaaaggtgaaagcgggccttgctgaatattccgccggctaccgtgtgctggtgctttcacacgcggaaaacggttttcgtgaaaacggcgggcttccggacggcctggttccgatggcgcttctggtcattaaggatgtaattcgcaaggatgcaaggaagacgctcgattattttgaaaaacagggtgtggagctcaagataatatccggcgacaacgttcaaaccgtttccggcattgcaaaggaggcggggcttaaaaattacaataattttatagacgcggccacgctgaaaacgccggaggagatgaaggctgcggcggaggaatattccattttcgggcgtgttacgccaacccaaaaaaaggatttaatctgcgcgctcaaggaggcgggccatacggtcgctatgacaggcgacggtgtaaacgacgtactcgcgcttaaagaggccgattgctcggtagcgatggcaagcggtacggacgccgcgcgcaatgtgtcccagcttgtcctgctcaactcggacttttcctccatgccgaaggtcgtagcggagggcaggcgttccatcaacaacattcagcgcagtgcgtcgctgtttctggtcaaaacgatttattcttctattttagcgatactgtttgtatttctcgatttcaaatacccatttgagccaatccaaatgacgctcctaagcgcgtttaccatcggcctgccgtcgttcgttctggcgcttgagccgaacagcgaccgtatcaagggcaacttttttatcaatgtcctatccaagtctatccccgcagcgctcacggtcatactcaatatcgtttttgtgatgattgccacatatgtgttcggcctcaatcatctgcaaagctcgaccattgccgttttgctgacgggctttacgggactgatgctgctgtttaaaatcagcattcccttcaacgccatccgcacggcgcttttcgcggtatgtaccggcggcacggttttggggcttacggtattccgggagattttttcggtcaatccgttcgactgggaggtcatggcggttttccttgtcctcgcgggcgtatctatcctgctgttcctcggctttttgaaaataatggatgtgctgaaaatggaaaagcatgtgaagctaaagctttaagataacctgttttattcatctgaattttgcggcagcgggcgggcaaccgcccgttttatttatttctaaatatagattaataatgcgaatattacacaagcttttctcgcgtttttgattatatgtttaaaagctgtatggcgccagtaagcactttttactgaattttatgttttatttccattggattttcgtttctttttctatttttcgacaaatttttagcaaaatttgagaaaagtatttgttttttaataaaaagtatggtatggttaatttgttatgagaggctttttatatattgccgcattttcggtctgcagataataattttatgttgaatttgtaatctgttgccgcatgaatctaaggcacatcattatcgggccctgtgcttgatattcataaaacttcctttacagctgataggaagaagatatttatggtcatgatgaatggaggtgggatattcagtcataccgtttggcggcggagcatgtttttacttctggccccaaagccatgtgggatgcttccgaacggaatagaaagagaaaaaacgggacgggggaacaaaatacttctcctaaagcatcctctcccgcccccatgacagcacattggcgcttggcagataatttgatgtggatggattctttcaagaaaaatgatatatgctgaaatagcttaactaggaggtagtttgtgttgaagaaaaatatccgaaagaggacaatcagtattttattgtctatcacaatgctcattgcaattctatgcatcgccccggcggcagcatccgctgagacgccgacagagggttcggcgcccgcttatgaatatatcctcggcgatgtaaacagtgacggcggcgtcaacatcgctgacgttttaaagattcaaaactggctcagcaaaaagcttgagcttacgaacaaagagcttttggcggccgatatcgacgcaaatgaaaaggttgaggtcgcggatgtactgaatatccagaagtacaaggcgctcatggcagttgaatacccgattggagaaaagcagacgattaacgaggaagatattcccgattacagcaatcccatcattccgacctatcctacagaggtaactgacccaactgacgttactgagccttcttccgaagcgacggagcccccgacaattccggaaggacagatgacgctttatgtcagcaacgcggttaattggatttcaaaagacggctgcaagctttgggcctataacgtcgatacgcaggaagctgtgccgatgacaatcgacgacgacaatgcctatttttccgcggcagttcccgaaacatggcagaatatcgcattctacagaagtacctacgatgttgacgaaaccaccttcagcatcgaccttccggttgagcagatgcccaacaagtggacaagcctgccggcaaggggagacaacgactgcttcctggtaacggctgacagcgcgggcgaatggaggctgtatgacgacctgattcacgaagtaggcgttaatacaatctattttgacaacagcgcgacccagtgggatacagtttatgtttatggctggtcatttggcttggcgaatgagtttgtagagatggaaaaggtgactgataatatatacaagtatacctttacagagactccgagccccggcgtaaaggggttcctgtttgtagcccaggacggctggacgacagataactaccaaaccggcgacgtagccgtggaatccggtaagaacctgtatacgaacctttcgtcttccggcggaaaatggagcggctcctgggacgtttacgcaccctgagaaaagccccgccctactgtaacaataggaaaaatccatccacgttttactttctgaaaaaaggcccgcggcagatatgccgcgggcctttcataattgataaaaaggcggggaatccttcacgccttatcctgtccagagtatgtttactgctcaggcggtagctccggtttattttgctttggatttacatgtaccatgcagtgcttgacgtcgggaaaatcgcgttccagcgcatggtggacattttccgcgatttcgtgcgctttgataagcgtctggtttccgtccgcacagatttccacatccacataaatttttgagccgaacagccgtgttttaagcaggtccacgccctccacgccttcctgctccattataaccgtctgcatccggcggattgtttcgccgtcgcacgatttgtccacgagcttgtcgatagcgtcgcgtacgatatcgtaagatactttgataatcatcaggcagattaggacgcttgcaatcgggtccagaatcggaaagcccatacgcgcgcccagaatgccgacaaagcttcccacagaggagagcgcgtcgctgcggtggtgccaggcgtccgccttgagggacgcggagttgattttcttcgcggcgagcaccgtgtaccagtacatcgcttcttttacgacaattgaaacaaccgcggcaatcaggggaagcaggccgggcgcctgcaaatcgcccccgtgtatgattttttccacgccggaaaagccgatgccagcacctgttgcgaagagcaggcccgccaggatgaacgcggcaatgcactccatacgctcatgaccgtactggtggctgttgtcttcttttttgctcgatatattgattcctaccatcaccacaatggtgctcagcacgtccgacgccgaatggacggcgtctgaaaccatcgcgctggaatggccgagcacgcctgcaatcagctttccggccgataaaataatattgcctgcaatagagacaaaagagactctcattgcgattttttttgcttgtaccgtatccatgggaacgtctccttttcctgacaaattaaaaaagcatccgcgggaacaataatatattgtcccgcggacgctgtgttacccatccgctgccggaataaccggcccgacaaagaaagctttgtctgtgttttatttattatatgtgcggttatttattttgtcaactctttttactcttccgtatcgggaataacatcggcgctgctgggcgggacgattccctcgccgtgtttctgctttttggcctcgggaagaataaggtttaggatgatgcccgaaatgatgcccaatccaataccgctcaggctaaagctgcccccgttgatttgtccgccgatgaccgcaccgcccatagagagcaccagcatgacggccgcgatgcacaggttgcggtttttcgtgaagtcaacctggtgtgaaacgagcgtgcgcaggccgaccgaggcaatcatgccgtacagcacgatgcaggcgccgccgagcacgcagttcgggacagtctcgattacgccgattgccttgccgaaaaagctgataacaattgcgacgagcgcggctacgcgcagtgttacagggttatagttgccggttgcggcaagaaccgccgtgttttcagagtatgtggtatttgcagggccgccgaacagtccggcaatcatcgtggcaaggccgtcgccgagcatcgtgcggtgcaggccgggctttttcgtaaagtccttgccgacgaccgcgccgtttgcgtaaacgtcgcctacatgctccacacaggtaacgattgcaatcggtgcaatcatgatgatggaggagaggtcaaatttcggcagggagaagttcggtatctcaacccaggcgcgcgtgctgatggactgcaaattcatcaatccctcgggcgctaagccggttgatgagacgagcaatgtaatcaggtagcctgcggcaagcgcgataacgatagaggaaagcttgaacattccctttccatagcaggaaagcaggatagccgtcaggcagacaaacagcgcgatgccccagctccagtaatagccgggggagaacaattcaaagccgttgttgctctgtatgttgttgatagcggagcttgcgaggttcagcccgataatcgctataccgacgccgcgtacgaccggcgggaacagcttatcgatgaatttgctgccaaacagcttgataagcagcgcaatcagtaaatagaacgcgcccgcgacaataatgccgcccatcgcgtatggaatgctttccgcctgcgtatcgccgtacatcggcggaataacccatccgccgccgttggggtccttaatcccaatgaccgcctgcagcgccgcgataaaggcaaacgagctgcccaggaaggttggcatccggccgccggtgcacaggtggaagacaatcgtgcccacacccgccatacagagcgcaacgccaacatcaagccccgtcagcaggggaacgagtatggtcgcgcaggacatggcgaacgcgtgctgaagccccaggaccatcgttttgcccgcgccgattttcgggtattcctttgcgccgggaaataagaaattgttgattttactgaaaaaagacattttctacttcctttcatttaaaatacacaataaaagctccggtattcttctcaaaaggggagcaagcatagagaaaaaaccggatttccacaatatattgtgtgaatcgttataactttaaagcttttttcaccataagtcaatacaattcgggaaaaaacgtaacaatttattcaaaatttgtttatatttaagggaaaacagaaaaattttttaaaatttcattttttatggtaaaataaccgtacgatatgaaaaggaagggcggggaaccaaatgaaaatcgaaatgccgcagggtgcgaaaaagatactcgataccctggggagaaacggctttgaagcttatattgtgggcggctgcgtgcgcgacagcctgcttggaagcaagccgaatgactgggatattacgacaaatgcccttccggaacaaattgccgcctgctttccagggtacacgcttgttttgaacggaatccggcacggcacagtgggaattgtggaggacggcgttttatttgaagcgacaacctaccgtgtggacggcacgtacagcgacaaccgccgcccggacagcgtagcctttacaccacggcttgaggaggacttatgccgccgggattttacagtcaatgccatggcgtacaatgaacgcgacggtctcatagactgctttggcggcaggtctgatttgaacaaaaggctgatacgctgtgtcggggaaccggaaaaacggtttgaagaggacgccctgcgtatcctgcgcgcgttgcgctttgcatcaaagcttgattttgcgatagaaaaaaagacggcaaacgctgttcttaaagaaaaagacaggcttttaaatatagcgaatgagcgcattgcaaaggaactgctttccctgctgtgcggccaaggcgcgggcagggtattgcgtgaatttccgcaggtgtttttcgttttcctgccggagcttgcgccgatgcttcattttgaccagaatacgccgtaccacaacctgccgctatgggagcatacggcaaaatcggtggaaagcatcgcgccgcaaagggatttgcgccttgtcatgctattgcacgatataggaaagccgctttgtaaaacaaccgatggacagggcgtatcccattaccgcggacacccccaaaaaagcgctgagatggcgcaggggattttaacgcgtctgcgccttccaaccagcctggcggaagaggccgtgcagctggttttataccacgattaccgctgcgaaccgtccgcgcgcgcggtacgcaggcttttaagcagggtgggggagcaagcggcgaaaaagcttgtacaggtccgcatggctgacgcggacgcgcagtccagttaccgcagggaagaaaagcttaggctgattgcggattatgaaagcatgctcagcgaggtgcttgcgcgcggcgactgcttctccctcaaagatttggaactaaacgggaaagacctgctcacagcgggataccccgccggaaaagagatggggcgcgtgcttgccatgctgctcggcgaggtcatagacggcaggctcgaaaataaaaaagcccttttgcttgcaagggcaaaagagctatacgtggacattatctgaaatggtttatagccttgccgcgcccgttttccgtgcggcgtccatgacggcctgcgcgactgcctttccaatgcgcttgtcgagcgcgtctggcaggatgtattcggcgtttaatttttccggcgtgacaaggcccgcgattgcaagcgaggctgccattttcatttcctcgttgatttcacgcgcgcggcagtcgagtgcgccgcggaaaatgccggggaaagccagcacgttgttaatttggtttggaaagtcggaacgccccgtcccaacgacggccgcgccggctttttttgcaggcccgggcataatttcaggcgttgggttggccattgcgaacacaattgggctgtccgccatcgttcccaccatttcctgcgtaacgatgtccggcgcggaaacgcccaggaacatatcggcgcccttcatcgcgtctgcaagcgtgcctgtttttccttccctgtttgtaacgcccgccatatacgcctgctcttcgtttagctcttccatgcccttgcacagaataccgaatcggtcgcacataaccatgttttttacgcccatgttcagcaggtgctttgcaatcgcaatgcccgcggagcccgcgccgttgattacgatgcggatttcctctattttcttgccgacgaccttcagcgcgttgagcagtgccgccgccacgacgattgcggtcccgtgctggtcgtcgtggaaaacgggtatatcgcagatttccttgagcctgcgctcaatctcaaagcagcgcggcgcggcgatgtcctccagattgatgccgccgaagcttcctgagataaggtaaactgttttgacaatatcctcaatattttttgagcggatacatatggggaacgcgtctaccccggcgaactccttgaacagcgcgcatttaccctccataacgggcatacccgcctcaggcccgatgtccccaagcccgagcaccgccgtcccgtcggtcacaaccgcgaccaggttgttccttcttgtaagctcaaacgactttttataatcctcatggatggccatacagggctgtgctacgcccggtgtgtacgcaagggataaatcttcccttgtattgattggcacgcgggagataacctctattttgccgttccattcataatgttttttcagggatttttctttgatatccataatccgacttcctttccggcaaatacaacatattgcttgttaaattatagacgaactgtctttccagtataatacaaaatcggcgcacgcgcaatccttatttgacaaagacgcgcgcatctattaaaataggaagtgcgagcaggccggacagccgcgggcagcgcgcgaaagcgcctgtccgaggaaagtccgggctccacagggcatgaataacggctaacggccgccgggggcgaccccagggaaagtgcaacagagagataccgcctgttttacaggtaagggtggaaaggcgaggtaagagctcaccggcgtcaggggaacctgacggccctgcaaaccctattcggagcaacaccgtggagagacgtatgcgccggcccggcgcgtcttgcggaggtggcattgagcgcgcgcggcaacgcggcgccaagatagatggctgttcaagacagaacccggcttacaggcctggtcgcaaacctcttaaataaaaacacaccgcgtgggcggtgtgtttttttatgggcggagcgtctgtgctcaaaccttgtttttcttgatgagcgcttccttatgctcccaaagcctctgcgacaaatcgacataatagttgtgcgggttttcaaaacgcttgacctcgtcccatagggtttcgagctgcagggcgcaattttttttaatttcagcaagcgccgggctctggtagacgggctttccgtttttaaaaagctgtacgcgcagcttccgcgcgcggaaatccgtcacggtcttgcgcttccaggtgtactgcgggtcgaacagctcatacggcttttggtcgtcgatttcctcaccaaagagcgtgacgacgtccgcaatcgctttgccgctcgccctgtcgtacaggcggtagaggtccttaaagcacggcgttgttatttttgaaacattatcgctgattttgatttttggtacgatttcgccgtccttctcaacggcggcaagcttataaacgccgccgaataccggctcggaggaagcggtaatcagccgttccccaacaccgaacaaatcaatcggcgcaccctgtaaaaacatatcgcgtatcaggtattcgtcaagggagtttgacgcgcagattttacagtctggaaacccggcctcgtcgagcattttacgcgctttttttgaaagatacgtaatatcgccgctgtctatgcggatacccgacggacggtacccaagcggcgcgagcacctctttaaatacgcggatagcgttcggaacgccggacttcagcgtgctgtatgtgtctacaagcagcgtacagtcccgcgggtaacgcagcgcgtaggctttgaatgcgtcgaactcgctgtcgaacatctgcacccagctgtgcgccatagtgcccagcgcgggcgtctggtatacgcggtccgcaagcacattggccgtgcccgcgcatccgcctatataagccgcccgcgcccccaggacggcggcgtcaaagccctgcgccctgcgcgagccgaactccatcaccgccttgccctgcgcggcgcggcagattcggcttgacttggttgcaatcaggctctggtggttgatgcacagcagcagcatcgtttctataaactgcgcctgtatgaccggcccgcgcacggtgacgaccggctcgccggggaaaaccggcgtgccttcaggcaccgcccaaatatcgcaggtgaacgaaaagcttttcagatagtccaaaaacgcttcgctgaaaatgcccttatcccgaagataggcgatgtcctcttgtgtaaaatgcaggttttttatataatccatcacctgctcgattccggccatcaccgcgtagccgccgttatcgggcacccggcggaaaaacatatcgaaatatgcaaccgtgccgcacagcccgttttcaaaataaccgcccgccatcgtcagctcataaaaatcggtcagcatagtaaggttcctttttccgtcaggtatcatttgattacatcctttcccgcgtcgtccaaaagaatatcctttaccatttcaatgccgtttaaccccatgttgaaatacgctgttaaatcggaaaagtctccgtcatgggagggcaggtcgaacgttgccgtcagctccgtagggacgataacccggcagggcttgttttctttgttaaaacctgttttaagcgtcaggcagaactgctggacgcataaatcggtgcagcatccggcgaccaggaaggtatcggttttcgggtgctcccttaaaaacgcctggaattcctcttccagatacccgttggtcgagttcttttttatgacgcggataccgctgagcgcttttagctcgtctacgagctcgctctccctcgtcccgccgacgcagtggcgcggataggaggaaaactccgggctgtcgtcattgtggctgtccgcaaaggcgataacgtcgattttccggcgcaggcattcgcttgcaagccttgcgacgcggtctttgatttgaaaaacgcgcgggcttgaaagctttccttcctttacaaacccatttaccatatctacgattacaagtacgcagctttccggccggaagtccttggccgcaagctccggcaaatcggaaaaggcgtcgtaaagatagcttaaaaagccggtcgattctttcataaattcatttttattcattgctgaaacctccttgtatggaacggtatatggaaaaaattaagaaaaaggatagcacaagattttgaatatcctttcaaatctgacacaatttatgcaataaaaggacgataaagaaaaaattttgtaaaattcacttgttttttttccatagaagatatataatagctttgcttaacagcgttttttcaggcgttatttaacttattggagtggtaatgatgagattgcgtaaacaggaactcggcacaaggaatctcgtgggcgccagggtagaggctgcccgcaagaaaaaagggatgaagcaaaaagagcttctggcgcagcttcaggtcaacggggtggacatgaacgcatccggcctttcaaagcttgaggggcaaatccgttttgttacggatgtggagctcgttgcgcttgccgatattttagaggtatccgtcgatttcctgctcggcagggcggaagaataaaatatatatttataccttacgcttattgcgcatcctttcgggggtgcgtttttattatgcccgcaatcaaagcggcggcgtcctcgattttgcctgtctcgataccggaaaagcccagcttgaagctgtacgcatcctgctcgccgtccgctattatcttgataccgctttgcgcgagcttttcatgaaagcccggctgctcgagcgcctccttcaaggtcaccttgacggcaagcgaggtttccagcagttgtatctgcgtttctgccggcatatattttttaagcatagccataagctgcgcgcttttttcgctgtaacgcaggcgctgccggcggaggtggcgttcaagctggccgtcgccgatataccgcgccagcgccagctgctccgttttggaagcggtctggttgtaaaattccgcgcttttttgaaagcgttctataagattttgcggcaaaacggcatatcctattcttaccgacggcagtaaaagctttgaaaaggagcctaaataaattacgcgctcgctgtcgtgcccctgcaaagcgggaattgggcgcgtgttgtagcgcagctctccgttgtagtcgtcttcaatgataatatggtttccttcctgcgcccattcgagcagctcgtagcggcggttcatgcggattgaccgccctgttttaagggagccggaggggtttagcagtaaaatatccgccccgctgtcgaatagccgcgtcggtataatcccgtcgctgtcgctttcaaccgtcatggccggaagcccgcagtcctgaaagacctgcgccgcgtggcgcgagccgtttgcttccattgcgaccgttttacagccgttcctgagcaggccgcaaaccaggtataaaagcggctgcgtgcccgcgccgattataatcctgccttcatcggctacaacgccgcgcacgccgtagcaataggacgcgagcgcgcgccgcagctccggctcgccctgcgggtcgccgtaggaattgattaggtactcgcagtttaatacgtccttgatatatttacgccagagcttcaggttcgtcgcgtttgcgtccacgctcctgctgctcaggtcatagcggaccactgccggctgcttccttttaccgggcccggcgcttttttccgctctcgcttcttcctcaaaatggaggtgcggctgtgcctgcacaaaaaaaccgcgctggggcatatttttaatatatccctcgacacaaagctgcccgtaggcgctttccacggtcgttttgctcaaaccgaggtcggcggacagccgcctgatggacggaagccgttccccgtgccgcagagccccgctttccacggacgttttaattttattataaagctggatatacaaaggcgtaccgcaatttttatcgagcgccaaaaaatcgtaaatcataggggactcggactcctcccatttgggataatttcattctatcatcgtacaccgtgcttttcaaccgcgttttattcttaatacggcgtttgcggttgatattttttccaaaaatcagtataatcagtcgtagctacgtatcatatcacaatacctattttgaaaggcagaagataatatggacagtaaggccgcgcgttttttaacaagcttaaagggaaagaaggtcgcgctgtgcggcatcgggaaaagcaattacccgctcatttcgcttttttcgcgctacggcgcgcaggtaacggcctgcgataaacgaacacgggagcagcttggtgaagcggcggggcaggcgcaggacgccggcgcgcgtttgagccttggcgagggttatttaaataatctcgatgcggatatcctgtttcgcacgcccggcatgcgcttttatatggatgagctcaatgcttttcgtgagcgcggtgtggcggttacgtctgagatggaggttttcttcgagctgtgcccgtgtaaaatcatcgctgtgacggggagcgacggcaaaacgactacgacctcgattattgcggagcttttaaaggccgcgggcaaaaccgtacatttaggcggcaatatcggcaaaccgcttttgcctgaaatcgaagcgataaaggacacagacatagccgtcgtggagctgtcgagcttccagctgatttccatgcgccaaagccctgaaattgccgttgtgacgaaccttgcgccgaaccatctcgatatccataaggatatgcgggagtacatcgacgcgaaaaagaacatcgtcctgcaccagaacgcgttttcccgcgcggtgctcaatatggataacgaaattacaaagggctttgcggcggactgccgcggcatggtttacggcttcagccgcaggcaaacgcttttaaacggctgctatacggaaaaagacggtagtattatgatggcggaaaacggaaatgctaaaaaggtgatggatatttccgacatcaaaatccccggtatgcacaatgtggaaaattacttagccgcggtcgcggcggtatggggaatggccgatgcggatactatacgccgtgttgcgcgggatttcggcggcgtggagcaccgcgcggaatttgtccgcgagcttcagggcgtcaggtattataacgactcaatcgcctccagccctacgcgcaccgcctgtggaacgctctcgctatatgatgaaaaaataattctcattgcgggcgggtacgataaaatgattccctacgggccgctcggccccgttatcaacgaaaaagtaaagctgctcattttaatgggagcgactgccggcaagatagaagaagcagttaaaaacgccgaaaactacaaatgcgggcatcccgttattatacgggtggaaaatatggagcaggcagtggaggccgcgcatgaaaacgcgcatagcggcgatatcgtatcgctgtctcccgcgagcgccagctttgacctctacccgaatttcgacttgaggggcaagcattttaaagagctggtccataaattaaaagcaaaagaaggatgaaacaattgaaagaactgttgttttccctgtgtacggcgcgcggcgtttccggaacggagcatgcggcggccgggattgccggggagtacctgggcaaatacgcgcaggtggaagaggatattaacggcaacctgtttggtgtgctgggggatttggacgcttccttccatatcctgctcgacgcgcacctcgaccaaatcggcctgattgtcacaggcatcgacagcaagggctttttgaaagcggagccgtgcggtggaatcgaccggcgtgttttacagggcagcccgtttatcgtactcgggaaagaagaggtgccgtgcgtctgcggctgtatgccgccgcacctgagcgacggcggggaggacaagcccatagcggcggacgccttgtggttcgacacagggcttcccgcggaaaaggtgaaggagcgcgtatccctcggagaccgcattgtgttcgacagcgagccgaagcagctgcttggggcgcgcgtttcctgcgccgcgctcgacaaccgagccggcgctgccgttatgctgcgctgcgccgaaaagctcagcggggaaacgctcaggtgcaaagtgaccgtggcgctgaccgctcaggaggaaatcagcggcagcggcgcgcgtaccgccgcgttcgctgcatacccgaacgaggcgatagccgtagacgtcagctttgcgaggcaaagcggcgttacagcggaaaaaagcggcgcgatgggtaagggcggtatgatagcaatcgccccgacgatttccggcgagatgtcaaaaaggctcgttgcgattgcaaacgaaaaaaatatcccgcaccagctcgaggtgatgggagccgccacgggaacgaacgcggactatatctcctgcgcgcgcggcggcgtaaaaacggcgctcgtatcgattccgcagcgcagtatgcatacgcaggcggaggttgtcgatttaaacgatatcgaagccgtggctgagttaatctgcgcctatgtgctggaaaggagcgcgtcgttatgatagatatggcacttttggaaaggctttgccgcacaaacggcgtctcaggcgacgagggccgtgtgcgtgaaatcatactgtccgaaataaaggactgtgccgacagcgtgacagtagacggcatgggcaatgtgctcgcctttaaaaagggcagaaatccggcgaaaacaaagctgcttttgagcgcccatatggacgaggtgggttttatcgtgaccgatatcacgcgcgacggcatgctgagcgttgagccggtcggcggcatcgaccgcagggttgtctgcggcaagccggtcacagtgggcccgcgcgcggtcaagggtgtgttcggcatcaagcccatccacctgctcaagccggatgaaaaggacaaaatgccgccgatggataaaatttatatcgatatcggcgcggaaaataaagaacaggcggagcagtttatcgatattggcgattatgccgcgttcgacagcccgtttatctgcaaggacggccggattatctcaaaggcgctcgacgacagggccggctgccttgttttaatcgagatgctgaaaaccgagctccagtacgatatgtatttttcattcgtcgtacaggaggaggtcgggctgcgcggggcaaaagcggctgcgtatacgcttgacccagaggctgcaatcgtcgtggaaacgacgacggcggcagacgcggctggcgtggaggagcagaaacaggtctgccgcctccgggaaggcgcggtagtttcctttatggacaagcgcacgatttacgacagcgcgtattataagctcgcgctgtcggccggcagggaggcgggcgtgaaaacacagcccaagcaggcggtcgccggcggcaacgacgcgggcgccatccattgctcgcgcggcggcgtgcgcaccgcggcggtttcgcttccgtgccggtacctgcacagcgcctgcacggtcgcggcgcaggaggatttggacgcggtatatgtcacggtattgggcacggcggaaaaaatcgccggaggaaacgtaaaatgatttacgcggcgggcggcgggtttgaagcgcgaatcataagccggcaaaagcaaacgccaaacccgtataacacgcgcatcctgtccctttataaggcgtacaaaggaacaaacctctgcgaattctggatgcaggagcagggcgctgcggttacggccttcctgtcaaggtatgcgggaaacgccgtgctggacatttgccctggggcggatgaggaagagctttgcggttttctcaaaatggctggctttcgcagcgccctttatgatggagcgtttgatttaaaacccgcggcggcttctgccgccggcgggaaaaccatgtgttttgtaaaaaacggcgtttcacagcccatgcttcctttacagccacaggcccccggcttgggagagctgcataatttgttgagggattgcgcgggagaagggtttcatccgccggattatgaatcctttcttctcgatatgtcccatatgacgcgccacggatgtgcagatataattgccctgcgcggcagcgggacgcttacttcgtgcgccttgagcctttaccagtgcgataacgcggcggtgctcggcggagtgtgctgcgcgccggacaaacggcgccggggctttggttcacaggctgtccttatgcttatcggtaagcttcaaagggagggcaggacgaatttgttcctgcattgttcctcgcgggaaaccgaacgtttttatgaacggcttggttttaaagcctgcgggagctggcgggagcatacgcgttaataataatagaaaaatacatagaatcaggggaaaaccatgagcagacagttttttcagttcgacaaaaaaattacggacgcggcgggcagggcgctggagctttgcgcgccgcagctgacatacacagaggaaatacaggaataccaccagcagaagatgctgtacgcgttccagaaagcaggtgtgagcgaaagccattttgtttcctccaccggctacggctatggcgaccgcggccgagacgcgctcgacgaggttttcgcgacagtatttgaggctgaggacgcgctggtgcgccataattttgtaagcggtacgcacgcgcttgctgttgcgctgttcggtgtgctgcgccctggggacaagatggtgtgcgttacgggaacgccgtacgacacgctgctcggcgtcatcggtatcggtgaggaagcgggctgtaacagcggcacgctcagggatttcggcatcgagtacagccagctcgatttaatggcggacggcacggtcgattatggcgcgatggagaacatcacgcccgatacaaaaatggtctatatccagcgttcgcgcggctacagcctgcgcccgtcgctccatatcggtgaaatcgggcagattgcgcgcagagcaagagagcttgcgccggattgtattgtgatgctcgacaactgctacggcgagttcatagagaaggaggagccgcttgcaaacggcgtcgatttgatggcgggctcgctcattaaaaatcccggcggcggaatcgcgccgaccggcggatacatcgcgggcaaaaaagagctcgtggaacagtgcgcatgccgcctgaccacgccctctaccggaagggaaatcggcgcgacgcttggtaacaaccgcgagcttttcatgggcgcgttcagcgcgccgcacgtaacgggcgaggctgtcaagacggcaatttttgcctccgcgctttttgaaatactcgggtttgaggtttccccgcgctactgcgacgagcgcgccgatattatacaggtattgaagctcaaaacaagcgaagcgctcacggcgttctgccgcgggatacagaagggcgcgcctgtcgattccttcgtcgtgcccgagccttgggacatgcccggctacgacagcaaggtaatcatggcggcgggcgcgttcacgctcggcgcctctattgagctttcggcggacgcccccttgcgcgagccatacgccgcctggatgcagggcgcgctcaacttccacagcggcaagctcggggcgatgctcgcggcgcagtcgatgctggaatgcggccagctttgacacgccggtatacataacaggagaaagggagaattcaaatggcaatagaaaaggtgcgggcgtatttcgaaacgctcggcattgcagacagaataatggagttcgatacgtcgagcgcaacggtggagcttgcggcgctcgccgcgggctgcgagcctgcgcgtatcgcgaaaacgctctcctttatggtggaggggaagcccgtcctggttgtggccgcgggcgacgcgaaggttgacaaccgcaaatataaggacatgttccatacgaaagcgaaaatgcttacgcccgaagaggccgaaacgcttgtcggccacgctgtcggcggcgtctgcccgtttgcagtaaacgaaggcgtcgccgtatatcttgacgagtcgctcagacgcttttcgtccgtgtttcccgcgtgcggcagctcaaacagcgctgtggagctttctattgcggagcttgagcggtattcttccggcttttccatgtggtgcgacgtctgcaagggctggcaggaggcggactgacggctttcattatttacatatgtttatcaaaagagggaaaccatttcacgggtttccctctccttgtatgaagaaaaccactcgctaggcgagtggttcaaaagaaggcttatgccgatgatgtagaaataggaactccctttgctaaaatagaagtgcggtcagccaactgcacgaggaaagcaaagggaggtcattcagaatgaacgacatgaatagtttaacgcatacaacatggaattgcaaatatcatatcgtattcgcgccaaaatatcgtaggaaagtgttctacggagagaaacgcagagagataggagaaatcttgagaacactatgtaattggaaaaaagtcaagatcatagaggcggaggtgtgtccagcccacatacatatgctattagaaatcccaccaaagatagcaatatcaagtttcatgggatatctcaagggaaaaagcagtctgatgatctacgagaagtacccagagttgaaatacaagtaccggaaccgtgaattctggtgccgcggatattatgtagacacggcagggaagaatgcgcagaagatacaagagtacatcaaacggcagctagacgaggataaggcaggagaacaactgacgatggataatttctaaacccgtttacgggcagcaagtaacaaactctcgcgattggcagaccgtaccaacgcgacgtgacgcgtgccgctagtattagagggctttgcccgtctatgaagaacccccggcttcgccggggggttactattttgaagcatactgcttctttgttttcagaaaacgttccgttccttgggtttcttgataaaactttatatattcaatcaaaagggaaaaacaattcgctgtttttcccttttgcaaacccttttcatcgacagggaaaacctcgtcgcaggttttcccttgaccctttccagccgagcaaggggctgcgccccttacaaaccccacacgatagaaaccatgccgttcctcgttttatgtctggaggcgtagaacagatactgcgggacgtttcagcgccgcgccttcgcgcggagttctacgtggggcggtacttattttaaacactttttgaacctaacaaaattatttccattttttggtgagtgtttttcaattttcgaactatttgtacgtaaatcaagttattatgggtacgtacttgaaaggagggagtttatgtcgccccgtacaggcagaccaccggcagataacccgaaaaatgtccgggttgaattgcggctttcggaagaagaaggcaatatgcttaaatattgctgtaaagaaagcggtatgaccaaaacagatgtgattcgtaagggcatccggtcggtatatgaacagctgaacaaataaaggaacgttgtgccactccgaaaaagcaaacacagcgttccccaacaccagccattgcagggcaatgacggcgtaaatattatagcatgcgcgcgtcttcctttcaagcggcggtgaattttataaacatgaaaggttgtacaggttttatgaatatcatcgaagagctctattacggcaatatcaatccgattgaaaaggaattcaaacgcgattccagctatgcgaagtttatgaaaattttctcagaaaatgaacataagctttttactttttttgaagagcacaaggaagaaaaggaattatttaccgcaatgtgcggcgcgcgcaatgccctgctcgactttggggaacgcgagcgctttatcgagggcttccggctcggcgcgcgctttttgctcgatatgctcattacggaacgtcccgccgcggttcaggacattacataatggcaagacccctgtttttaaaaaacgctgcaaaaggagaacaaaatgaaagatgaagatttaaacgcgctgttcaagctgctggaacagcatattcgtccagaggcggggagcaaaaggaaacgggaagagcaaagggaagaaccgccatatcaaaatgaatatccctttgcttttcatgacaggtttcttgaatacattggctttgccgccagcagcttttcaatttttctggaattcaatccatttgcgagtaagaaggaagcagattttcttttcagccagtttgttttatcgtgtattgcgcggtgtgccggagacacgcatgctggtgaaatcgctggcagcggatattgttatataacggacgcgctgaaatactgctgttcttcccctgagaattgagccggacaaaaaaacaatccgccctctgcttgttttcacaataacatagtaagtaccgcacccatgtagtattacgtacgccaaaaaagcactatccaacgtagaactccgcgcgaaggcgcggcgcaggaacgtcccgtactatcatttctacatccggcgcataaaacgaggaacggacagcttcctcttagggggattttcaaggggcttcgctccttgaatcggctgtggagggataggcggagggcggcgtagctttagccgcccgtaagccgtaagggaacccatcgaaagggttcccttgtaccgacgaaaagggtttacaaaagggaaaaacagcggattgtttttcccttttgattaaacatagaaagttttatgaagaaatccaagaaacagcacgttttctgaaaaccaagaagcagtatgcttcaaaaaagaagggaaacagccctttgattcatgaaacatagaaagttttatcaagaaatccaagaagcagtatgcttcattcaataaaaaaagaaacggcacgttgcaaaaaagaaggaggaaaccaccgaaagggtttcctcctttttatatcatatttttctgtaaaaaatataaaatttctaaaaagcatgccgccgctaaaaattacggcttttacacgccggaccgcggcgttttgtttctcaggttctgaaaaaaattcctgaggacagcggcgcattcttcctccagcacgccgcccgtaagctgcggcctgtggttgtagggaagctcgaacaggttcgcgacagacccgcacgaacctgcctttgggtcctgcgcgccgtacaccacgcgcctgatacgcgcgttgataatcgcgcccgcgcacatagggcacggctcgagcgtaacataaagctcacactgccacagccgccagccgccgagcgtccggcacgcactgtcgattgcctcaagctccgcatggcacaacgcgtttttatccgtttccctgcggttatacccgcgcgacacaatgataccgtcctttacgattaccgcgccgaccggtacctcgccgttttcggcggaagcctgcgcgcacaaaagggcttccctcataaaccgctcgtcgccgttcatgataccatcatccaagtcatcgccgcttcgcctaccagcaggacaaccgcaataatgacgccgggcgtcacaaaaaaggttttaagcctctccttcagcgtcagggaggaatccggtttttctatgtggaacaagcccttgtccttcctcgacaggaagaaaaggcccagcagcgcaagcagcagggttgtgcccattacgagaatataaaaaatatttcctataagcgtgccgaactgcgtcgtcacgatatcgccgataacggaatagaaattgtttgcaaaatgcagcagcatcgccgggataatcgaaccggtatacataacgaggaaagcaagcgcgagcccgccgataaacgcaaacggtatctgtatgatgttgccgtgcatcaggccaaacagaagagaagaaatcaatattgcaaagccgtcgccgtatttgcgcagcacgccgaacagcacgccgcggaataaaaattcctcaacgaaggccggtacgcacgcgacggatatcacatacaaaatgtttgcggaaagggagccgtcagtcgcgaccgacaggctggactggtcgtacggcaaaccgattgcctcaaggttttgcagcagtatttccaccgcgaaattagagaacataaagaccgcaagccccgcggggagcagggcgagaatccgttttacgcttaccctgctgcggaaatgaatcaaatcgtccaggtgcgtgtgctccgttttacataaaatcagcgcaggaatacacatgccgaggatagagacgattccctgcatcgcgaaatacattgacgggtcatattcgcccgcaccgccggcgccgtacgtgactccgccgccgaaaatgagaaaaaagctgagtagggtcgcaataaaattaaacgccacaagcacaataatcagcgagacgccggaatggttcgacagggcacgcagtgcctttttttcctgttcccttttcaaataatcgctgttataggccggatagtaaaaggcgttaccgtacggatacggcggcatatacatctaatcacatccacatacaaattaaagtttaaaatattatatcatcgagcaggcgcaattacaacaaaaaaacaattctgtggcaagctttcacgtcctgttcacaacttcatatttcgtagttagtaggtatacgtgttgttgacaaagaccaatttcagcgttatatttataataagaaatggataaataatccatatttatcacggataggagggtttttatgaggcggtcaggaaaattggtcagcgccctattgttttttttgctgctcacgggaattacggcctttcccgcaagcgcgcaggaaacaaaaccagatatgaagagactgagtaaggtttttggtgattatctggacgaaaaagggatttatccgctgggcggcgagctgttgattaattatatggcatgttcaaatggctggtctgtcttttatggtaaccggggaggatcagacgcgatgatgcagtctgatagggtcggaaattatatcttctattctttcggctggaactatccgtataatattggaatctacgcggaaaaagacgggacggtttatacgctcaaggaagcgtatgaagctggggaaatcgatattaacgcgattgcggcatctgaaaacctgaaagctcttgtttttaaacctggcgacgtagacatggatggaaccgtagccttaaaagatgtgctgttcgttcaaaaggtattagcaaaggcagaagaaatgagccggtatttcagcagctttagcttttgtgattatgatgggaatggggtgattgagatcagcgatgttttgggcatgcagaaagaaattgcaaagatgccaaagtaagaagtgatggtcagaaaaggatgagaatcaggagggaaatgcggatgaaaaaaactattagtttaattcttgctgttatgctttgctctgctccggtcggcataaatgctgtagctgagcaaaaagatacagtgccccctaaagacaaaatatccaattcactgtatcaggaatttaccgagctggaacaaagcggcgtaaatatgcagacggaaaagattccagtttggatatggtatcaggacatcgaccaaaaacaggtcgataaacaagttgaaaagcaaactgggcttacagaagataatattgcggtggattttgagatgccaggaattaccctgttgtccaatttacaaaacgaaatccctgacagccaggaaaatatgaaagcttatctggagcgcactgctgttgtaagagagctggagaaacagaaaacggaattatatatttcaaaacgtcgagatatatccagaaataaatataataatatgtcctcggatttattaaataaaatacaagctgggaacatcaggtttaaaagcaattatgctcctgcgattatagtggaaatgtctaaaaaagaggttgccgctgcagcgcaattaaaagaaattgagaggatcgcattatatacagaaagagattttatagatgacgacctgtcctctgttaataaatccaccggagcagaaaaagtgcggaacacgacaggattaaccggaaaaggcgtaaaagttggccaaattgaaaatggcgtgccgggaacacataccgagcttaatccggagaaaatacatactgtcgacagtaccggtaaaacatttcacgctacatcggttgcccgtattatgggaggaagcagcggaatcgcgcctggaatagaaatttatgcggggtcagccagtacttcaatgagagccatcgaggaaatgatcagacttggcgtatctttagtcaatcgaagtaacggagcaaacaggacagattcgtatacagatcttgaaaggtggtatgaccaccttgcgtcgcagcatcatgtgacgtttgtacaggctgccgggaatgacagtgtcgctacagcgctgatacatgaacccgggctggcctataatgtcattacggtcagtgcgtatgaagataaagctacagaaaccacggaggatgacagaatagcaacatatagcaggtatttaaaaggcggtggctgcctcaagcccgatatagcaggccctgtagccaatcaaccaattaatgggacgagcgccgccacacctgctgtgactggagtaatcgctttactctttgaattgaaaccttctttggtttatcagccgcaaacagtaaaagcaattttgacagcttctgttcagagaaaggtaatttgtgaccctgttgaagaaatggaacagggtttaacaacaaaacagggtgcaggagctgtggacgcatggaatgctatttcgataatttcacagcatcaatacggctatggagaaatcacaagcgatacggaatacagaaattttgttcaaatgtcatatggggcttcacatattaatattggattgtcgtggttaagagagaatatagcctcaggcgatcattcttcatcaacggaagtagaagtgcaaacgggtgtgcttccggatttagatatgcgtgtgtataacagcgacggttcgcaggcgggagcctctatcaattacaacagctcaacagagatggcatatttttcacttccggccggaagctccagataccaaatcagaattaataattacaatgcgtcaaataacgagcctgtgcgctttgcctatgcgtggggtacagacaaaatgacgtttaagaaaagcttaacgggaactgattttcctgcagacggcgtttactttttacgcagtaaattaaagcagggctccggcgcataccttactgttaacgaaacaacaggacaggttacgcaggaagcgttcacgggcgcttccaatcaacagtggatcatcgacaaaaatggcagcgagccatttacggtgaaaacgtgttcagttgcctgctcaggttatctgtctaggggaagcgacaaccaaagcgctgtaattcaaaaaaatatcccgtcctatattgccttcggcggcaatgggctggacaatgcactttctctttcatattacggtaccgacaacagcataactccctcagattctgcattgggcagcggctgtgtctggcgctatatcagcccgccggagcgctttcagtggtatcccgagccgctctcttaccaaaagggagatgtaagctatgatggtacgattgaaacagccgatctgttgctcatgcaaaaatatattggcatgcagattacgctgaccgcgctccagctctatcttgctgatatgaacggggacggcgtggtaaacaccgctgatgttcttgcgctccagcgcctgataaacagcggtgcgtgattaattacaaaaaataggaccgcgccgaataatacgggctcagtcctggactgaaagatatcacaacaagctttttcctgtagatgaaaagtgttttaaacggagcagcgcagcggaagcggaactgctccgttttttaattagcgtctttagacagttgagcgcagaaagcgcgaaacaaagaccccccgctatgcggggggtgacaaaaggttataccaaaaaaatcaccagacaagtataatagggttgttcaggcctattgtaaaagaaaggtgattttaatggcaaatcaagcaaatagtctgtcacatacaaaatggatgtgtaaatatcacatagtcatggtaccaaaatacaggagaaaagtaatctacaaccaatacagggccagtttacaggaaatcatcaggctgttgtgtaaatataagggagtagaaattctggaaggccatatgatgccagaccacgtacatgtgcttttaagtataccacccaagcaaagcgtgtcaagttttatgggatacctaaaagggaaaagcgcgctcatgatgttcgacaaacatgcaaatctaaagtacaagtttgggaacaggcatttctgggcggaaggctactatgtgagcacagtggggctcaatgaagcaacaataaagaaatacattgaagaccaggaaaagcatgatattgcaatggataagctgagtgttaaagaatacgaagacccttttaaaggtagcaagtaatacaaacgtcctttaaggggcggcaaaggtgataaaggcaataggcttgaacacatgtgaaagccagcgcctttagacgctggccggttacatgggcttatagcccttgtgcataccacccgtttgacgggtggttatgattagatgcgttgatgaatgtaaaaataggattacaccgtattaaatagacggtgttcaattgtttctctgaaattaggcgatttattactcgagtgattgtactttattaaaaattgttaggcttccagttgtttttccatcgctaaaattcaaaaaatattgaattgagcagatgttcatccctttgacaataggccgttttatggtataataatcagataaaacataaaggtagggtggagcactatggaatcctcaatctcgcgcaggcaggcaagggaacaggcgtttatccttgcgtttgaaacgaatttcaccgatgattcggttgcggatattttagaggccgcgcagctttgcggcggcgagcaggttgaccccttcgcggttgggcttgtcagccagatgctggagaacagggaagaaatcgaccgtgtaattgaagcgaaggcaaagggctggaggatgaaccgcatttcaaaggtgagcctgacgattttacgtctgacggtctgccagattctttttgaaagcggggaatccggcgcgaaggacccggtgagcgtagcggtgagcgaagccgtgcgcctttccaaaaaatattccacgcctgaggacgcgtcctttgtaaacggcgtgctcggtacagtcgcccgcgccgctggcccggcagcggaggcggaaggccaatgagcgtctttctgggcatagataccagcaattatacgacctcgtgcgccgcgtattcggagaacgaagccgtgcaggaaaaaatgctccttcccgttaaaccgggcgaatgcgggcttcgccaaagcgacgcggtattccatcacatacagcagcttccaggggttatggaaaagctggcgccgcggctgaaagacaaaaaaatagaagcagtcggcgtttccgcaaggcccagacaggaggaaggctcctatatgccttgctttacggtcgggacagcctgcgcgaaaatgctttctctcgttttggatgttccgctttatgaattttcacatcaacagggccatgtggccgcggcgctttattccgccggccggctcgatttactgaaaaccccctttttagcgttccatgtttccggcgggacgacggaggcgctttatgtcacaccagacgaagaagagcttttccgcacgcgcatcgccgcaaaaacgctcgatttaaacgctggccaggcggttgaccgcgtcggcgtgatgctgggcattcctttcccgtgcggcatggagcttgaaaggctcgcggctgcctgtggggaaaagataacggtaaagcccgcgctgaggggctgcgactgctgcctttccggtctggaaaaccagtgtggaaacctgcttttacagggtgcctccaaagaatatatcgcggcgttttgcctagaatcgattaggcggacgctttttgagatgacggcccgccttcaaaagcaatacggcggacttccgcttttatacgctgggggcgtcatgtcgaataccatgatacgaaaatcctttgaacaggaattcggcgcgctgttcgctcagccggaattttcaagcgacaacgccgcgggcattgcggtgctcgcagcggtgcgccacggggggatagcattatgaacgcgatgatttccgtatcgcagctcaatttttatatcaaatccctgctcgacggcgaccaaaacctgtcgaacgtttttgttacgggcgaaatctcgaacctttctggccattaccgctcgggccacctttatttttctttaaaggacggcaaggcctctgtcaaggcggtcatgttttcaagcagcgcgtcacgcctgcggttcctgccggaaaacggcatgaatgtcattgtgcgagggcgcgtttccgtatatgaagccacgggccagtaccagatttatgcagaggacatgcagcccgatggggcgggttcgctcgccgttgcgtttgagcagctgaaaaacaagctttcccgcgaggggctgttcgaccaggcgcataaaaaaccgattcccctgatgccgcggaaaattggtgtaatcacctcgcctgcgggcgccgcgcgcagggacatagaaagcatattaaagagaaggtacccgctggcggatgttctgctatgccccgtgcttgtgcaggggacaggggcggccgccgggcttgtacgggcaataaaatatctggacggcgaaaacctctgcgacgttatcatcatcgggcgcggcggcggcagcgctgaagatttagccgcctttaacgacgaaacgctcgcccgcgccgtatatggagcgaatacgcccgttatatcggcggtcgggcatgaaaccgattttaccatatgcgattttgtctcagacctgcgcgcgcccacgccttctgcggcggcggagctgtgcgtgcctgaccaggaggaattgaagcaagagcttgacggcttttccctccgcatgaaaaaacaaatggaagcactgctgtcggcaaatcgggcgcgtgtaggcgcgcttgcctcatcgcgctggcttaaaaacccgtttgactgctatatcacccagaacagcctgacgctcgaccggctttcacaacgcctctcctcgggttttgaaaaggaattcacggtgaaaaagcagcggctgtccatgctgtcctcgcagctcgacgccctaagccccctgcatatcctgtcgcgcggctacgctgtcgcgagcaggggcggcaaggcgattaaaagcataaaagaagtaaaaagcggagacgaattttccctgcttttatcagacggcagtataaactgcgcagtaaaggaatgataaacatgaaggcatataaaacgtatgaagaagcggtagaaaggctttcgcaggtagtcgcccttttagagcagggcggcctgccgctggaagagtctttgaagctttttgaagaaggcacgaagcttacctcgttctgctacggcgcgctcaaggacgcgcagcagaaaatcgaagtgctggccgtaccggaggagcaaacggatgaatcatgatatcgatttaattgagcaggcgcttttaaaaagccttcccggcagggactgcatggaaaaagacgtaatcgacgcgatggaatacagcctcatggcgggcggcaagcgaatccgaccgcgccttgtgcttgcgttctgccgcctgtgcggagggagcagtgaacaggcgctcggctgcgcctgcgcggtggagatgatccatacctattcgctcatccacgacgatttgccgtgcatggacgacgacgaaatgcggcgcggcaggccgtcgaaccatatcaggttcggtgaggatatcgccctgctggccggcgacgcgctccaggcgctcgcgtttgaaacgctactgcgcggcgtcacgccggaaaacgcgcactgcctggcaaaggcgggcgcataccttgcaaacgcctgtggggcggcgggtatggtcggcgggcaggtcatcgatttgcagagcgaggataaggaagcgcccatcggggtgcttaaaatcatggacggtaagaaaacaggcgcgcttatccgcgcggcctgcgtgatgggatgcatctgcgcggaagcggacgacaggctgtgcgcggcggctgaagcgtacgccgaaagcattggccttgcgttccagattatggacgatatcctcgacgtgacggcggacagcgaaacgctgggaaagcctgttggaagcgacggggaaaacaaaaaatccacgtatgtttccctgcttggcatcgataaatgcaaggcgctcgtcgaagagcttacagaaaaagcggtgtccgcgcttgaagcgttcccaaacgacgccgaagagcttcgggagcttgcgctgcagctcgcgcaaagggaccgctgatattttgtatgcggaaaaaacaatggggatggggaggtttcagagattgtggatggtgaatatcaggttctggataaaatagaatctcccgatgatttacggtatttgacagatggggaactggaggaattatgcgctgaaatcaggcgggtcattgtggacgccgtttcaaaaaacggcgggcacctggcctcaaacctcggtacagtcgagctcacggtcgccatgctcaaggcgttcccgcgggtggaggacagaatcgtctgggacgtcggccaccaatgctatacacataaaattttgaccggcaggtttcatgatattggtacaatccgcaccgaaggcggtatttccggctttccaaagcggtgtgaaagcccgtacgacgcatttaacgcgggacacagcagcacctctatctccgcggcctacggtatcgcgcgggcaaaggagttaaaaggggaggatggctataccatcgcggtcatcggcgacggggcgcttacgggcggccttgcgtacgaagggctcaacaacgcgggaaggtacaaaaagaacttcatcgtcgttttgaacgacaacaaaatgtctatctcccgcaacgtcggctctatggcgcggtacttgacgggcatccgaatcaagcccgcctacctgcgcgtgaaaagcagggtggaaaagacgctgatacacacgcctgtcgtcggcaaccccatcaggaggattttgcagcgctccaagtcgagcctgcgtaaaatggtatataaggacacgctcttcgacgacatgggctttacctattacggcccggttgaggggcataatttcgaggagcttgaaaacgcgttcaacgcggcaaaaaatgtaaagggccccgtacttgtacacgtcgtaacgacaaagggcaagggctaccagtacgcggaggacgaccccaaaaacttccatggtatctcgagcttcgatgtagaaacaggcgaaccgattacaaagggaaaagggttttcaaacgtattcggtgaaaagctttgtgagctggcccacagcgacaaacgcatctgtgccatcacggcggcaatgaaatccgccaccgggcttaatgatttttgccgccagtacaaggaccggtttttcgacgtcggcattgcggaggagcatgccgttacctttgcgggcggcttggcagccggagggatgctcccggtgttcgctgtatattccacctttttacagcgcggcatggaccagattatccatgatatcgcaacacagaagctgcacgtaattttggcaatcgaccgcgccggaattgtcggcgaggacggcgaaacacatcagggtgtgttcgatgttgcgcttttaaattcgattccgggcgccgtgatttacagcccgtcctacttcgatgagcttaggcgcgatatgcagaccgccgcctataccaacagcgggattgtcgcggtgcgctatccgcgcggcggggagctttaccgcccgcgtgacttcaagtggggtaaaaaaacctttgatttttacggcagccccaacgcgcagacgcttttaatcacatatggcaggctgttcagctacgcgtgccttgcaaaggaacggctatttaaaaagggcattgatatctgtattttaaagctcgggcgcatcaagccgattcccaaggaagcgattgcgcaggcgaagcgcttttcctacattttcttttttgaagagggtatggcggccggcggcgtgggcgagcattttatgtttgagctttcccgcgggcgctggaacggcaattacagcctgacggcaatcgataaccgctttgtccagcaatcatcggtcgaatcgtccttaaaagcgctttcccttgacgacagcggcatggcgaatatcatcagcaaaggaattcgggaggacttgaaataaattgagtgagaaaaaacggctcgacacgctcgtctttgagcgcggctatacgcagagcagggaaaaggccaaggcggtcatcatggcgggccttgtttacgcggacaaccaaaaggcggataagccgggcgccgtgtatccggcagacgtaacgctcgaggtacgtgcaggcgcacccaaatatgtaagccgcggcggctttaagctggaaaaggcaatcggcagcttcggcatcggtttaaaagataaaattacgatggacatcggcgcttctaccggcggctttaccgactgtatgctgcaaaacggcgcggccagggtttacgccgtagacgtgggctacgggcagctcgactggaagcttagaaacgatgggcgcgtaatcaatatggagcgcacgaacatccgcaaggtagagaaggagcaggtgccggacgagctcgatttcttcagcgtggacgtttcctttatctccctgaagctcgtgcttcccgtcgcgcgcgaattcctgagggacggcgggcaagcggtctgcctgattaagccgcagttcgaggcgggcagggaaaaggtcgggaaaaagggcgtcgtgcgcgacaagcaggtacatacgcaggtgattagttctatatgcacgttctgccttgaaaacggctttgatgtgctggggctcgatttttcccccatcaaaggcccggaaggcaatatcgaatatttaatctatctgcaaaaatcgaaggaagggcggatgctctgcgatacgtacccgcaggagcttgccgctcgttcgcacgaacaactcgataaaaagggtgattgatttgaattttgcaatcgtaccgaacccaacgaaggagggcgcgcccgcatgcacgaaaagggtcgcggaaatccttgttaaaaacggcggcgtaccgatgcttctcaacgaataccagaagtatgtgccggctggcggcgcgcgtttctttcaaggcatcgacgcgctggttaccgccagcgacatcgtcataacggtcggcggagacggcactattatcagcgtcgcaaaatacgcggcggcagccggaaagcccctgctcggtatcaacctcgggcggctcggcttcgtagcggggcttgagcctaaccggctttgcgagctttcgcgcctgtttaccggggattaccgctgtgaaaacaggatgatgctcaaggcgtctgtaataaaggaaaacagcgaaaaggtatattatgcgctcaacgacgtgaccgtgtcccgcggctcactatcgcgcattatcgatttgacggtttccttaaatgatgaggaaatcagcgaataccgcgcggacggcctgctgttttccacgccgaccggctccacagcctattcgctttccgccggcgggccggttatccagccgcatatgcagtgtatcctgctcacgcccgtctgcccgcattccctgttttcccgctcggtgctgttctgcgaccagtcacgcctgaccgtcagggcggaggaccaggataacgcggaggtctatttaacggtcgacgggcaggattcggagaaaatttcttccggcgaccggatacggattgaaaaggcggaaatttcagcaaagcttatttttctgcatgataagagcttttacagggtgctgagcgaaaagctcagccacaggactgtttaacgaggtgcttccattatgaaaacaaaacgccatgcaaagatactggagctcatccagagctacaccatcgacacgcaggaggagcttctgcgccgcctgcgggaagagggctacgatgtgacgcaggcgaccgtttcgcgtgatatcaaggagctccgcctgctgaagacgctcggcaaggacggcgcttataaatatacgacggggaacaggagccagacggatatcagcgcgaacatccacaccctcttttccacaaccgtccagcatatcgattttgccggcaacatgattgtactcaagaccatcaacggcatggcgcagggcgtctgcgcggcgctcgattccatggaatgggacggcgtcgtgggcacaatcgcgggcgacgattccatttttatcgttgcgcgcagcaacgcaaaggcggtcacgctcacatcggaactgaaaaagctgttatgatagaggaagattcttatgctttcatccctttatattgaaaatatcgcggtcatcgaaaagacgcagattgattttaccgggggcttcaacgtcttaaccggtgaaacgggcgcgggcaagtcgattgtcatcgacgcattaaatgccgtactcggaaaacgcacgtcgaaggacattgtgcgcacgggcgcgcagagcgcgtgcgtcagcgccgtttttacggatgtggacgacaaaaccgcggcaaagctcacagaatacggctttccggcggaagaggacggcacgctcattttgtacagggaaatcggcgcgtccggcaaaacggcctgccgaatcaattcccgtccggcgacggccagcgtcctgcgggacgtcgcttcatcattgattgatatccacggacagcacgaaagcggcgagctgatgcagcaaagcgcgcaccaggaatatatagacagctttgctgattttggcgatacatatacagcataccgcgccgtatttacaaagctccgtgactgcaggcacaggctcgaggcaatgaaaaccgacgacgcgcagcgcgcgcgcagaatcgacctgctgcgctaccagacggaggaaatcgacgcggcggccctcatcccgggcgagcttgaagcattgggagagcagaaaagccttgcgctcaaccgcgagcgcgtgcaaagcgcgctgatgggcgcgcatgagctgctcggcggggaaaacgggcaaaacgccatgcgcctgctggaggaagcggcggacacgctcgagggcgcgcaggaatacctgccggaaatcaaagcgctttccacccgtgtgcgcgacgcgttctacgacatacaggactgttcgtcctcgcttttagagctttcagacagcgcgcaggaggagcagttcgatttgggcgaaatcgagcagcggcttgactccatctaccggctgtcgcgcaaatacggcgagacggtcgatgatatcctggcatttgcgcggcaggcgcatgaagagctgcaaacgcttttggaatatgacacgaacctggaagcgctgcagaaggagtttgaaacgctgctcgaagaggcaaggggcctggcccttacgctttcagaaaagcgcaggcgggcagcttcgctttttaccgcgcgcgtgcaggaggaaatgacatatctcgatatgccgaacgtgcgccttacggtcgatttccaggcgaccccgctttcatcgtgcggcatggataagatagagctgcttatttcggcaaaccccggagaggagccgaagcccgtttctaaaatcgcgtcgggcggcgagctttcccgcatgatgctcgctatcaaaaacgtgcttgccgacaaggaccagacgccgacgctcattttcgacgaggtagacaccggcatcagcggcagcgcgtcgcagaaggttgggttaaagctcaaggctgtatcaagcggcaggcaggtcatctgtgtaacgcaccaggcgcagattgcggcgcttgccggcacgcacttcctcattcaaaaagaggtgcagggcggcaggacgttcacacaggtaaaaaggctcgatatggaacagcgcaaatatgagcttgcgcgcattatcggcggcgtcgagattacagagcttacgctcaagcatgccgaggaaatgctcagtaaaaaatagtggattaaaaaattcagatagggaaatagggtacccatatgaaaagctggtctgtagcacaattgaataaagaggcggcgcaaagccttgcgaaagacttttccctgccgcctgtcgccgcgatgctcctgcaaatccgcggggtggagcagcccgaggaggtcatgcagtttttgggagacgacgcggatttttccgacccgttcctcatggcggacatggacaaagcggtggcccgcatcgaaaaggcaatcgaaggctttgaaaaaatctgcgtttacggcgattacgacgcggacggcgtcacgtcgacagcgctcttatactcctaccttgaggggcgcggcgcggacgtaagctattatatcccgtcgcgcgaggcggagggctacggcatgaatatggctgccgtggaaaaaatgcgcgaacagggcgtacagcttattatcacggtggacaacgggatttccgcggcggatgaaatcgcctatgcgaatacgctcggcatcgacacagtcgtaaccgaccaccataagccgcccgaaaccctgccggacgcctgcgcgcttgtcgacccgcaccgcgcggactgtgaaagcccgtgcaaggagctgtgcggcgtgggcgttgcgttcaagctggttatggcgcttgaggacggcgacctcgatatagacgggctgttgttccaatacgccgatttggcggcgctgggcaccattggcgacgtcgtccccttaacaggtgaaaacaggatttttgtaaaatgcggcctttcgcttctgcgcgacagcagcagggaaggcatttgcgcaatgcttgaggacgctgcgattacgccgtcaaagctttccgccggcaaggtcgcctttacgctcgttccgcgcatcaacgcgtgcggcaggcttgcgttatcccagaagtctgtgcagctgcttttgacgaacgacaaggagctcgcgcaggaaacggcgcaggagcttgggcgagacaacgccgagcgccagcagattgaacgcgatattttaaaaaccattgaagaggagctcacacgcagtcccgctattcggcgcgacagggtaatcgtcgtcgatggtgaaggctggcatcccggcgtgattggtatcgtcgccgcgcgcataaaagagctttacggaaagcccgcgcttgttctgtcccgcgacggggacaccgcgaagggctccggccgcagcatcaagggcttttccctgatcgacgcggtcagcgcctgctctgaatacctggcgtatttcggcgggcatccgatggcggccgggcttacgatgccgtcaggccaaatcggcgcgtttcgcgccgctatcaacgaatacgcaaaaaaacaaggggaaatgccgcagccaacgctcgaaatcgacctcaaattaaaccccgcgtttttgtcaacagatattgtcagccagaccgcgctgttagagccgtacggcgcgggcaacccgtcgccgctgttcggcctgtataatatggtattaaaggggattaagccggtcggcgcaaataagcacctgcgtcttacgttctcccgcggggatacaagtgtcacggcgatgcgcttttcctgcacgccggaagaattcccctatagtgcgggcgacgtgctcgaccttgccgtcacgacggatttgaacgaatacaacggcacggtatcccttagcgttatcatacgcgacatgaaattaagcttcgcggacaacgggaaaatgatagcggacggctgcctgtttgaagcgcttatgcggggggaaagcctgacacggcggcagatggaatacatacggcccgtcagggaagaatttgcatatgtgtaccgttttttaaaaacggcgcagtcctgggattatgggctcgacgttttatgctgccggctgcagcgggaatccatccattacggaaagctgcttgtcatattaaccgcgatgcgcgagctttcgctcattgaatttgaagagggcgccgataccgcgtgccatatcagggtgctgcccgcgggcggcaaggtcgatttaagcgccgcccccatcattatgcgcatggaccaaatgcagtgattttaatgactttaacatattcggagaggtaggtttacaatgccggagaacaccgtacattatcaggactatgaaacccttgtggagatgctcaggaaaagcgaccaaacgttcaatatggagcttatcgacaaggcataccggcttgcggaaaaagcgcacggcagccagctgcgcgtgtccggcgtgccgtatatcctgcatccaacctcggtcgcctgtattctggttgacctgggaatggatacggaatcggtagcggctgcgcttctgcacgacgtggtggaggacacagacgttacattggaggagatatcgaaggatttcgggcctgaaatcgcccacttgattgacggcgtgaccaagctgcgcaaaatcccgttttcatcgagggaacagcagcaggcagaaaacatacgcaagatgctcatggccatggcggacgatatccgcgtcattatcatcaagcttgccgaccgcctgaacaatatgcgcaccatcgactgcaaggcggagcaaaagcgcagggacactgcgcttgaaacgatggaatactacgcgccgattgcaaaccggctcggcatccgcgcgatgaaggaggagatggaggacctctctatccgttatcttgacccggtgggctactgtgaaatcgagcacgcgctcgccctgagcaaatctgagcgcgacaagttcatttccaccatcaaggaggaaatcgtctcccgtacaaagggcaccataccgaacgtatatgtcgagggaagggtcaagagtatcaacggcatttaccgcaaaacctatatgaagggaaaaaccatcgagcagattttcgacatcttcgcggtgcgcgtcatcgtcaataccgtgaacgactgctacaatgtgctcggcattatacacgatattttccagccgctcccgaaccgcttcaaggactatatttccacgcccaagccgaatatgtaccagtcgctccatacgacggttatcggcaaggagggcattccctttgaggtgcaaatccgtacatgggaaatgcaccataccgctgaatacggcatcgcggcgcactggaaatacaagctcggcctctcgaaaaaggattccatggaagataaggtctcttggatacgcaggatgcttgaaaaccaggcggacgacgacgcgaccgatttgctgcgcaacatcaaaacagatttggcctcggaggaggtatatgtcctcacgccgaagggggacgttctaaccctgccgctcggctcgaccgtcatcgacgttgcgtacaacatccactccgccgttggcaaccgcatgacaggggcacgcgtcgacggcaaaatcgtgccaatcgattataaggtgaaaactggcgaaatcgttgaaatccttacgaggaaagagggcgggaaccccaaccgcgactggcttaaaatcgtgaaaacaagcgaagccaggagtaaaatacgccaatggtttaaaaaagaaaagcgcgaggaaaacatagcggagggcaaggcggagcttgaacgcgaattcaagcacgcgggaatccagctcacggaaaaagagatggctgaattcctttccactgttttgcgcaaacagcattttgcgacaaacgacgacctgttcgcggcaattggctacggcggcgtacagctgtggaaaatcatgccgcgcgtcaaggaggagtacgcaaagcgcaacgcgcctgttgaggagaacccgcagccagtgcaaaaggaggcgcctccgaagcgccgggtcagcagcggcgtcattgtcgaaggcgtggacgatatgctcattaagttttcaaagtgctgcaacccgctgccgggcgacgacatcgtcgggtttatcacacgcgggttcggtgtttccatccataaaaggtcatgcgtaaacgtaccgaaaaacatggaggaatgcgaagacccccaccgctgggtcaaggctgtatgggcgggcgaggtgcacgaaagcttccaggcgacgctcaatctcgtggcgtccgaccgcacgggcctgcttgcggacgttaccatccagctttacaatatgcatatctttatcaataattccgaatcacgcacggcgaaaaacgggcaggcaatcctgcgtttttccattacggtcaacggcaaggagcatctgcagatggtgattgacaagcttatggcgattaacggcgtgctttcagtcgccagggtataataaaataaggccgtgcaggcggcctccaaatacaaatagacgcaatcgattataaaggataaattatatggagcatgtaatcaagtggcttctcgaggatgaaacccctgaagtgaaataccgtacgatgaccgagctgctgggtatgccgaaagacgggccggaggtaagaaaggctcatgaaaatttattaagctcgaacagtcttgggctggttatggataaattcaagctaaataaaaagtgggaggatatcaacgctttattagcgctcacggagtttggccttaatcgtgaagacgtaccagttgatgactatgtcggccgtgccatcaaaaatttgaatttgagcatgaagtgtgcaaaaatattgctgcttaggaatttggtatcgctggggtattacgggcatccctgggtgcaggagcaaataccacttgttttttctgcgatacggcaagacggcacgcttcgatgtttggacaaaaccaagaaaacaaacgactccaggctgccggatatgggctgctacaggcagactaccacctgccttttactcgcggcagagctgaaaaaggcaggcgtggccctgccgcaatttgagccgttggttaatttttatatcggccgcaatgtcattttccgttctgatacccctgaaaaggtaattatcaaagatatggcgggaacattttatccgattgaccatgtacacatggggttacagatgattatgtatgggctttcggttcttggcggggcggaccatccgaactgtgaaaaagcatgggcgctgctggaaggcaaaaaagataacgaggggaaatatatccttacagaatctttcagggagccttatttcaatgcgggcatggcgggcaagccgaataaatgggtaacgctgtatgtcctgctttcaaaaaagtatcggacaagctgagttttgctatgggcttaggcagggcgttcaaacatgcagggagaaatcgcggtttgatgcgatgggcaatccgccatatgctttttaagcacggatggggaatcgagcataggccggcaaaagaaatataagaaaaaatcaaatgcaggtttgcctgtattttggaaaggatatcaatatgaaggcagtcatacagcgcgccgcgaacgccagtgtggcggtagacggcgttaccgccggagaaatcgggcggggctttttaatcctgcttggcgtggaggacggcgacacgccgcgtgacgcggaggttttggccgcgaaaatatccggcctgcgcatattcaaggacaggaacgataaaatgaaccttgcgctttgcgacatcggcggcggcgcgctcgttatttcgaattttacgctctgtgccgactgccgcaagggcagaaggccgaactttatcgccgccgcgaagccgccgcttgctgaggagctttatgagtatttctgcaaacgcctaaaaggcaatgggataacgcaggtagaaaagggcgtgttcggcgcggatatgaaggtatctcttctaaacgacggccccgtgaccgtcatcatcgattcaaaggagctgaagcattaaatgctgcaaatagaacgctttatcgtgagcatcatgcaaaccaactgctattttgttacggacaaagcctcggggttttgcgccgtcgttgaccctggcgcgtatacgccggggcttacgcagaaaatagaagaggcgggcggaaggctaaaatacgtactgctcacgcacggccacttcgaccatatcggcaaggctgacgaaatcaggaagcagacgggcgcaaaaatcgtcatcggcgcggacgaagaggaattcctgcgcaacaacgatttgaacctgtccatcatggtcacgcctatgggctttgacgcgttcgatgccgatatactgctcggggaaaacgggactgtaagcctcggggagacagagttccggctgataaaaacgccgggccacacgaagggcggcgcgtgctatatcgcaggcgatgtaattttcacgggtgacacgctgatgaaggaaactgtcggacggactgattttccgaccggcagctataaggaaatgatggagtccctgaaaaagcttggcgctttagagggcgactataccgtttaccccggacacgacgacaagacgaccttgcagcacgagcgtgaaaacaacgtttatatggggaacatgacgtatgaagattttgattgatagccatccgtttcattacgaggtggaaaatcttacgcgccttttcttcccaaatgaaaagcttgaggttataaaaacagcggaaaactgcggggccgcgccgtatgaagaaccatacgtgattacacggcgtgaagaaacgggcaataccgcgaagctgacagcctctgtttcctttggcagctataaaaaatcgtcgtcggcacaggtgccgtgcgatgcgcccgattacgataaatcgtgcgagcggtgcctggcgatattgcttttcagattgctgtcggaatatacgggtatcaccccgccgtggggtatattaacgggcgtgcgccctgtaaagctgttccgctcgcttgcgcggcgctacggcagggaggcggcgcgtgtttatttcgaggatatcctgctcgtgtcgaaggaaaagacgaacctggcgtatgtgacggaatcgaacgagcagaaaatattggagcggtccggcaaggattccttcagcctttacatctcaatcccgttctgcccaacgcggtgcagctactgctcgtttgtatcccagacgattgaacgggcccaggagctgatagagccgtatacggagcttttatgcagggagcttgcatatacgggcgcgcttgccaaaaagctcggcctgcggctcgaaacggtctacatgggcggcggtacgccaacgacgcttagcgcaaatcagctggaaagggtgctcggcacggtcggggactccttcgacttatccgcctgccgggaatttaccgtcgaggccgggcggccggacaccatcgatatgcaaaagctggaagcaatcaaaagctgtggctgcgggcgcatcagtatcaacccgcagacattgaacgacggcgtgctccggcgcataggcaggaagcacaccgcacagcaggcaatcgacgcgttccagcttgcaaggcaggcgggctttacacatatcaataccgaccttatcgcggggctgccgcaggagacatttgagagctttcaggaaacgctgcaaaagattttggcgctttcccccgaaagcgttaccatacatacgctttccctgaaaaaatcgtcccatctgacggggcaggggcttgaaatccagcgcgaggacgcaaagcgggcggcaaaaatgcaccggctctgcaaggagctgcttcccgacagcgggtattttccctattacctctacaggcagagccgtatggtcggaaaccttgaaaacgtgggctggtctataaagaaccacgaagggctgtacaacgtttatgtcatggacgaaacccatacgatattcggctgcggcgcgggggccgtaaccaagctcaagcagccgggcggtgatttcctggaacgtatattcaactttaaatatccatatgaatatatcagccggtacgacgaaatgctacgccgcaaggaaagggcagaggctttttatgagcagtataccaaatagctaccatcattacgtgaccagcgcgctgcaaatcaacgacgcggcccaaaacggggcgcctgattttgtgatgcaggtggaagaggaataccacaaggacgtcgcttatatcgcgaagcagattttaaaccccgaaaaccggtgcaggattgtcatgctgacaggcccttccgccagcggaaaaacaacgaccgcaaagattctgggcgatgagctcgaaaagctgggctccggcgcaattatcatatcgctcgacgatttcttcctgggcgaggcgcgcaccgcgcccggccgcgacggcaagccggactatgaatccgtctatgcgctcgacatcccgcaggtgcacagctgcatgttcgacctgattcattacggcacctgcaatatgccgaaattcaacttcaataaaaaacggccgcacgagaaaaaaacggtcataactttgccccagggacatatagctattatagagggcctgcacgcactcaatcccatttttacagacgagctccactgccacgggcttttaaagctttatgtaagcgtaaagcagggagtcgccgcctcaaacgggaagctattgctcagcgcgcaggatatccgtttcctgcgccggctcgtgcgggactacagctacaggagggccgacccggaatttacgttcgatatctggcagtccgtctgcgctggtgaaaagaagaatattgccccgtacaagaagcattcggactttacgctcaataccatccacctgtacgagccctgcgtcgtcgggaaaaaggcgtatccgctgctgtcgcagatagaagaggagagcgtgcattacgaaaaggcgcgcaggctcatggaaagcatcgagcggttttccccgcttgacgaagcgcttatcccgcgcacttctatgatacgcgaattcatcggcgggggcagctataaatattaaacccagttcacaagatgttattgaaactatttgcacgcggtgctataatgttaaaaacgccgttacaaaacaaaggagatgtgtcttatgggaatttttgacgatatcatggtaaacgcaaaatccgccgcaaacgcagtggggaagaaagcggagcaaatcgtggatttttccaagctgaaatacgccgaaagcggcatagagaacgaaatttcgcagaagcttggggagcttggcggctttgtatatgattcgatgaccgccggggaaatggataaagcgcttttagagaaaaagaccgccgagcttacggagctttatcaccagctcgaaatgacgagggaaatgatagcggcctccaagaataaaaagtgctgcaaggcatgcggcacattgaacgacaaggattcactgttctgcggaaagtgcggcgcaaaactcgaagaagacaggaaaagcggagagccaaaagcagataacgcggaggcgccggcccagccggaggaaacgccgaagcagcaggcgccggcccagccggacctgcaggtactggaacagccccaggaccctcaaaaagaggaataagcagaaaaccaggcgggggaacaccccgcctgtcattatgaagctgaaaaggtggtgttccggtgtcgcaaaattcaaagccagccggtaatcagaccttcttacggggcgcgatggtccttggcgtaagtatggtcatcgtcaaaattatgggcatgatttataaaatcctgcttgcccaggtattcgacggcgttggatacggcatttttaatattgcgtacgagctttataacccgctcttcatgctcgcgaccgcgggcttcccaatcgcgatttcgcgtatggtatcggaaagcgtggcgcagggacggtacagggacgtgcggaaaatccacaggatttccatccctatttttgtatgcacgggcattctctgcttcctgattatggctgtcggcggcaacttctatgcggagcttgtcggcgcgccggaagcaaaatttgcaattttcatgctttcgccgaccatcctgttcggctgcctgatgtcaatctaccgcggatattacgagggcctgcgcaacatggtgccgaccgccacctccgaaattatcgaggcgtgcggcaagctctttctgggcctttcgctcgcgttcctgatgtcctatgccggcacgcaggaatataaagagagcggaacgctgttcgggcaggccatgaagaacaaggacgcgttcaattcccaattgatgtcctatacggttgccgcggcgattatgggtatcgccatcggctcgctgctcggctttttgtttttactcatccgccataagtcgaagggcgacggcctgcgcagggcggaccttgcgcgcgcgccgcattcacgcacggcaaaatcgcttgcaaagcagctcgtctttacggcaatacctgtggggcttggcgctattattatgagcgtatcgggcacaatcgattccacgctcgtccagatgcgcatcatggatattatgaaaaccgagcccgagacactcaaaagcatttataatttccttgacccgctgctgtttcaggaagagaaaatacagaccttccttttcggctgctacggctacgcgctgacgctgatgatgttgatttccgccgtgacgcaggtgttcggaacaagcgccctgccgacgattacggcggcttggaccaaccgcgacagaaggcagataaagcgcgggattgagacggtcctgcgtacgacggcgctcttcacgcttcccgcgggccttggcatgtcggtgctcgcatggccgattatgaacctgatttacggcagccccgcgcgtaccgcggaggtttccattggggcaaacgtactccaaatcatgggaatttccgttattttcatcgcgacgagcacgcccatttgcagcatgctgcaggcggtcggccgcgtagacctgccgctgaagcttctgtcaatcggcatggtgattaaaattatcctcaactatacgctcgtcggcatcccgacaatcaatatccagggcgctacggtcggttcgctcgtcggctacctttttgtcacggtcacagggctgtatttcctttgtaaagaaacccgtatcgtacctaattttgtaacggtctttatcaaaccgctgatggctgcggttttgtgcgcttttacagcatggggcggctaccagctgattaatatagcaattccaaccaaacctgcgacaattttagccattgttctcgctgtaatcgtttatttcgtatttctgcttttgttccgtgcgattacgaaggacgatatcaatatgctgccaaaaggaaagaaaattgcgaaaacacttgaaaaacatcacctaataaggtagaatatgtatcgaaataccttgaacatgcgttttttcattcccggaggtgggcgctgaaagtggagtttaaagaaaaggaaagctataatttcgacgacctcgtgtccatcatgaagcttttgcgttcccctgaaggctgcccctgggataaagaacagacgcacagctcaatccgccagaactttatagaggaaacgtatgaggcgattgaagcaattgacacgcaggataccgcccttctgaaagaagagctgggcgacgtgctgcttcaggttgttttccatgcggaaatggaaagcgaaaaaggtgccttttccattgacgacgtatgcgacggcatctgtaaaaagctgattgtccgccatccgcatattttttccgatgtccaggctgacacatccgaaacagttttaaaaaactgggacgccattaaaatgaaaacaaaatcgcagtcgacgcagggcgaggtaatgcagggcgtttccaaagcgcttccttccctgatgcgcagcacgaaagtccagcagaaggcttcaaaggccggttttgactgggacaatgccgacggcgcgttcgagaaggtcgaggaagagctttccgagcttagaagcgcttatgagcagggcgaccatgccgcgtgcgaagaggagcttggcgatttgttgttttctgccgtgaacgtttcgcgctttgtcggcgcggacgcggagcgggcgctataccgggcctgtgacaagtttatcagccggtttacggcagtcgagcggcttgctgaagaaagcgggctcgacatgaaaaaagcaactctggctcagcttgattccctgtgggaaaaagtcaaggagtgtcaaaaataaaataaatataaaaaaacggaggattttattatgaacaaaacagagttaatcgcagcagtagcagaaaaaagcgagctttccaagaaggacgcggaaaaggcggttgcggctgtgctcgatacgattgttgattgtgtagcaaaggctgagaaggtacagattgtcggctttggcacatttgagcagcgtatgcgcaacgagagaacaggctgcgatcccaggacaaagacgcagattatcattccggcatccaaggttcccgcttttaaggccggcaaggcttttaaagaggctgtcgataaataatcagcggcgttttggttcattttgtgtttaaaggggctgtctctatcttcagagagggacgctccttttttcatttttaaaacaacagaaaggcaggtgcagtctgtgcgtctggacaaatacctgaaggtcgcgcgcatcatcaagcgccgtaccatcgcaaacgaagcctgtgacaaacagcgcgtgctcgtaaacggtaagccgcagcgcgcgtcctacgacgtcaaagcgggcgatatgattgagatacaaatggggcagaatccctttaaggcaaaggtgctcgaggtaaacgagtatgccaaaaaagaagacgcctcgtccatgtaccaaataatcccgtaagctccgtcataaaccataagcgcccaacataaaatgaacaacagggaaatatgttggaggtgcaatatggctgaagataaattgaagcaaagaacgccgcacggcctggtgctggagaacaggaagaacctttcattgtccggcgtgcacgacgtcggcagctttgatgaacagaacgtcgtaatctataccgattacggcgagcttaatatcaaaggcgggcagctgcacatcaataagctgagcctggacacgggagaggtgtcgatagacggcgatatcgtctctctgatatatacggaaaaccggccctcagggggcggcctgttctcaaagctgttcagatagggtgtgtcttccttggagttaacccaatttagccagccccagatttttctgttcgctgtccttgcgggaatcctcgccggtatcctttacgacgtctttcgcctgctgcgcacagcggggctcaattcccttatacataccgtgatacaggatatcgcttttatgtgctgctttgccgtcgtttcttttctgtttgcaattgcgttcaaccagggcgaggtgcgttttttcacgctgctggggcatatcgcgggcctgctcgcctaccgttatacaatcggcatcgtgactggcaggctgtttgaaagcgtcgccgtcctgctgcggaagctgaaatcatttacagggcgcgtaatcaggaaagcatacggattatttcagaagattggcggcgggtttgcaaaaaaagctgtattctttcgtaaaaataataaaaaaaacaggaaaaacgacttgcaaccggattctgcaatggtgtataataaaaaacagaatagggttttgcccttaaaaaagaagacgcgtattttttagaaacgctaacaaattacagcttgctgtaattttacgcgctttgcgcagcagcaaaatcataaattttgcagaaccgctataaaaaatatgggctccatccccgtttcattaggaagggaaagggaaaaaacatggccgacatgcaggacaaagaaaaagtcatccaggaagttgacctggtcgaaagcaaaaagcaaaagcagcaaaagaaaaaaaagaaaaactttattatatatattgcgctgattgcgttctccgtatatgccgtcgtaacgcttgtaaaccagcagattcagattaaccagaaaaaggccgagtacgacgaactggtagacagcagctacgtgtgggacgtcaaaatcaaagaaatctccgaggtttacaattcggacgacaaggacaatgcaaaatacatagagaaattcgccagggaagaatttgactacgcaaataaagatgagcgcatctttatcaatatcgcgggcgattgacgccggtatctcatcaagggggacaaagtttttttatgcagcttgaagttggaagtattttagaaggtaaaattacagggattacaaatttcggcgctttcgtagaccttcccggcggcgtgaccggcatggtccatatttcggaggtcgctccgacctacgtcagccaaatacgcgatcatctgaaaatcggccaggaggtcaaggtgaaggtattatctgtcggggaagacgggaagataagcctttccataaagaaagcgatggagccgcagcagcagtcccagcgccccggaggaaggggcggcaggcccgacgcgccgcgggacagaagaaggcagccgactccgccggcgcctcctgttacgagccccggcgattttgaatggcatgcgaagcgcagcgactcgaacagctttgaggatatgatgtcccgcttcaagcagtcgagcgatgagaaaatctccgcgctgaaaaagggcgagagcgccgcacgcaggcgtaaaccgcaaaaataagaggataaaagaacccaccgcttcggcacgatatgcgaaggagcggtggattttttacatttcaaagtatggcaaaaacgctgctttatcaggtataacaggcggctgttccggaggaaaagatggaaagagaaagagtcttgacaaatccaaaggatttggtgaggatagagcttaaaaacgcgggctttgacatcggttcaatccacccaccaaggcgggtgtacctgctggcggacgatgtatacggcgcaatgctccagcgggaatgcggaatatataagtacccgctgggcggaaagctgttcgttttgaaaaacaacccgcaggctgggtttgtgaagggacagatgtgctcgcccgcgattgcaacgcaggcagaggatttaatcgccggcggcgtcagggaattggttcacatcgggctggcgggcggaatttcgcctggtataaggattggcggcgtggtgctcacagacggggcatataacgataccgccgtggcggggctctatgggtacgatttggattttctcgggacgtccacgtcgatgacggatgagctggagcgaacgctttcacaaaacagaatcaaagcgtccagggggaaaagctggacgacggatgccgggtatcacgaaacctgggggcaaattctcgattaccggtcaaaaggagctttatgtgttgaaatggagggcgccggcctttttacaatcgcccggtacagaggctgcgcggctgccgcgctttatattatttctgatgtaataacggaaaacggctggagccttgggtgggaaggaaacaatatttcaaaaacgatatctgatatcattgacgccattacaagccggtaggcggcccgctgtgtcccgtactccgcatacaaaccgttgaacgtgttttctgtttgtaaacgttgccttttctttatcaaaatgtgaatttttataaagaaattgtgaagatgtatttcttttttatcgatattgtgctataataacaacaggtaaggaagcaaatcccaaataatccttatcttagcgtgaaaaggaggacgactctatgacaatcacctacacagccagaaaggtaaacctcagagataactttaaggagcgtgttgagaaaaagctgaaaaagtttgagcgcattttcggtgaaaacgcctcagccggcgtgatcgtcacattggaaaaaaacaggcagactgttgaaattacgattaatgacaacggcatgatataccgtgcggagaacaccgcgcctgagatgaacgacgcgctcgacaaggtggccgatattttaagcaggcaaatccgcaagaacaaagcaaagcttgaaaagcgcctgagagcgggcgtgttcgacgaatatattgcacagacgcccgagcttgacgacgtgcaggaggaaatcacgtacgacgtatgcaggacgaagaacattccggtcaagccgatgctcgtggatgaagcgattttgcgcatgaacatggtcaaccaccagttcttcatgttccgcaacgcagacacgcacgaaatcaacgtcgtttaccgcagggacgacggcgcgtacggcctgcttcagccgattgaagactgatttttcctatgaatataattgggcgggacgcgcagcgtcccgccttttatccgcctgaatgcacaaagagaaaatactcgacaaaatgcgccgatggtgttatatttataagcgttctgtaaaaatcatacaggcggttatccgcttttaaaggaagaaatatcatgaatgaatttaaactcctctgcccgtgcctgctcggcgcggagggcatggtcgccgacgagctgcggcgtatgggcgcgcagggcgttacgccggaaaacggcagggtgttttttgacggcggcccccagatgacggcgcgcgcgaatttgcgcctgcgctacggcgagcgcgtacagattgtcctcggcgtgttcgaggcgcgtacctttgaagagctgtttcaaaatgtaagggcgctgccgtgggaagcgttcatcgggaaaaacgaccgtttcccggtcaagggacggagcctgggctctaagctccacagcctgccggactgccagtccattattaagaaggcggtcgtggaacggctcaaaagccgctaccgcgtgccgtggttcgaagagacgggcgcgctttgccaaatccagtttttgattatgaaggataaggcgaccgttacaatcgatacaagcggagcggggctgcataagcgcggctaccgcgccctttccgcacaagcgccgattaaagagacgcttgccgcgatgatggccgaccttgcgcatgtacacagcggccatacggtgattgacccgatgtgcggctccggcacgctgctgattgaagcggcgctcaaggcaaaaaacatcgcgccgggccttaaccggcattttgccgcagaggaattcccgtttattccggagaaaatctggcgggaggaaagggaagaggcgcgcgcgcttatcaaaacggacgcccctttccaagcctttgggtacgatatcgatgaagaagcgcttgccgtcgcccgcgacaacgcggggaaggcgggcgttgccgacgcgcttgttttaaaaaagcgcgacctccgcggtttttccgaaccgtttgaacgcgccgcggtcttatgcaacccaccctatggcgagcgtctgctcgatacggaaagggcgagggagctgtaccgtattatggggcggcttttcgtgaaaaaaccgggctggagctacacgataatcagccccgacgatgagttcgagcagtgcttcggcagaaaggccgacaagcgcaggaagctttacaacggcatgataaaatgccaggtttacctctatttcaggaatggaagtgcgggcaggtgatacaggtttgggtatgaacagaaaagcggccagggcggcgtttccgaacacgattcccgtcatgctcggctatgtgttcatgggcgcggcgtttggtattttactttcgagcaagggctatgccttctggtggtcgtctttgtccgctctcatcgtttactgcggctcgatgcagtttgtcatgattgacctgctgacaggcaaattcgacctgcttgccgtcgttattatgacggtcgccgtcaacgcgcgccatttattctacggcttgtcccttatcgataaatataagggtatgggcgcaaaaaagctgtacgcaatctttggcctgaccgacgaaacctactccctcgtctgctcgcaaaacccgccgcttggggtggaggaaaaccgtttttattttttcacgacgctttttaaccacatctactggattgcgggctgtacgctcggcgggctgttcggctccctttttacctttaataccaaggggattgattttgtcatgaccgcgctgttcgtcgtcatttttgttgagcagtgggaaagcgccagggtgcacagccccgcgctcatcggcgtgggcgcgacctttttatgccttgtgctgtttggcagcgatattttcctgattccctccatggttgtcattgctgttttgctctcgctgctgaaaaaaccaatggaagcgaggcttgatatatgacacagacagctttgcagtccctggttacaatactggttatcgcgggcgtcacgtttcttatccgcgcgtttcctttccttgttttccgctcgcataaaccaattccaaaattcgtatcctatctcggccgcgtcctcccgtttgccgttatcggtatgctggtcgtttactgcctgcgcggaacggctgtttttgcttatccgtatgggattcccgaagccatttcgattgtggccatcgtacttgtacataaatggaagcataacatgcttttgagcatcggcggcggtacggtgctttatatgctgctggtccagcttgtttttacatagcgcacaaaggggagcggagcccttgcagggggctcgctcccctttataatggaaccggtacccgcacgcgagaaagtgacgggattttatagaggcggataggaattgactggagctggtcagaaaacagctgccccgggctgctgccgtccggtataaacgcagattaccttgataaaaccgctctcttttcatgttttttttttaaaaaacagcagaaaatttttttgcaggcgtttaatttaagcgcctgtgtttttattggctgttttttgggcaggcttttggtaagaaaaggtactaaaaccccacttgagcgccatagatttaatcaatatgtaaataaattatgaagaaggaaaattttacttgattttttatggcaaaggggttaatatagttttagcactcaggaagccagagtgctaaaacaacttaaattattgctttaaggaggcaatttatatgacaatcaaaccgcttcttgacagagtcgttttaaaaatggaggaggccgaagagaccacgaagagtggtatcgtcctggcgggcagcgcgcaggaaaagccccagtttgcgacaatcgtcgcggcgggccccggcgggctggtagacggcaaggaggtcaccatgtacgtgaaggtcggcgacaaggttatcacgagcaaatactcgggcaccgaggtcaagcttgacggcgaggagtacaccattgtccgccagtctgatatcctggcgattgttgaataatctaaaatactaacttgtgatacggaggaatgagtcatggcaaaacagattgcatacggcgaggaagccaggaagtcacttatgaagggtatcgaccagcttgccgatactgttaaaatcacactcggcccgaagggcaggaacgttgtgctcgataaaaaattcggcgcgccgctcattacaaacgacggtgttacgattgcaaaggaaattgagcttgacgacccgtttgagaacatgggcgcacagcttgtcaaagaggtttccatcaagacaaacgacgtagctggcgacggcaccaccacggcgacgctgcttgcgcaggcgctcatccgtgagggcatgaagaacgtaacggccggcgcaaacccgatgatgcttaaaaacggcatccagtcggcggttgatacggcggtcgcggccattacgggcaattcccacgaggtcaacggctccaaggatatcgccagggttgcaaccgtttcgtccggagacgaattcatcggcagccttatttccgaggcgatggataaggtgagcagcgacggcgtcatcacggttgaggagtccaagaccgcggagacgtattccgaggttgtagaaggcatgatgttcgacaggggctacattgctccttatatggtaaccgataccgacaagatggttgctgacctcgacgacccgtacatcctcattacagataagaaaatcagcaacatccaggaaatcctgccggttctcgagcagattgtccagagcggcaaaaagcttcttatcattgcggaggacgttgagggcgaggcgctcacgacgctcgtgctcaataagctcaggggtacgttcacctgcgttgcggtcaaggctccgggctttggcgacagaaggaaggaaatgctccaggatatcgccatcctcacaggaggccaggtaatttccgcggacctcggccttgagctgaaggacacgaccatcgaccagcttggccacgcaaggcaggtcaaggtcgataaggaaaacaccattatcgttgacggcgcgggcgacagcagcgaaatcaaatcgagagtcaaccaaatccgcgtgcagatagagaacacaacctctgagttcgataaggaaaagctccaggagcgccttgcaaagcttgcgggcggcgtagccgtcatcaaggtcggcgcggcgactgaaatcgaaatgaaggaaaagaagcttcgcatcgaagacgcgctcgccgcaacgaaggcagccgttgaggaaggtatcgtcgcgggcggcggcgttgcgctgatgaacgcaatcccggccgttgcgaaagaggtagagaaggcggcaggcgacgaaaagaccggtatggctatcgtcctcaaggcactcgaagagccgctgcgccagattgtagtgaacgcagggcttgagggctccgtcgttgtcgagaaggtaaaagaggcaaacaaggtcggctacggcttcaacgcgctgacccaggaatataccgatatggttccggctggaatcgtcgacccgacaaaggtaacgcgcagtgccctgcagaacgcggcctccgtcgctgcgatggtcctgacgaccgagtccctcgtaaccgacatcaaggaaccggcggctcccgccccggctccggcacccgacatgggcatgtattaatcagatacaatttaaaagctacggacggcattgctgcaaacgcattgccgtccgttttttatatgtgttgagctagctttggaggctcggctttcccgcatccgggtactgttccagcagcttttcgtttgcaagctccagttggcgatggtattcgcagtagggcttgcttaaccgtttcattgctggaacgaatacatcgtagtacccgctcgtgctgttgaaccgcctcataaattccatcagcctgccggcgggggagttcctatactcgtccgactgtttataggttaaataccgccggagtatttcccggttgtcagtcaggaatttttccggattttcaatggagcttttggtgttatcaagcatccttttcatttcacctgtgccgatatgctttgtaccttccgccaggtaatcctccaaatcctttggtatatcaatcggcggcacgccgtctaaaaatgaaagaatcgtatcatacgccgcctgctgttcttccgtttgcaccggttcgttcaaaaaccttgcaaaatgcatacagataaaacgcccgtaatagcctgggaacgcgtccagcagcttttcggctattgttttgcttttttcaagcgactgcaataccgcgcctatttcggaatagggtttccccgcgcataggtgctcaagggccgcacttttcatcgtgccgtactgcaaatccagttcttttctgactaaaacgttttgcagggccgaacaggttttgtcatccagtatggctttaatgtccgctatgccgacgtcgagctttcttaatacgccaaccttacgcaggacggcggcgtcctcctcgctgtactgcctgtagccgttttccgctgccgccggggaaaccaatccgcacagcgtgtagtattcgattgccttttttgtcagtccggtgagcctgctcacttcatgaatcaacatgtttttcacctccttctcatcataaaccgcccccttgggtatgagtcaagcggttttcaatattatgtgataactcatcacttgcatttccgtatttctatgctatgatgaaaatagatttttcctaaacaggggcgtttttcatgataaacacagccaggctgttagcgcagcgccagttccaaacacaggtaaagaaaataacgccgctcggcggcggggtttccttacctcgtttgaaaaagagccatataacgccgtaatcaagctgtatttgttgcgggacaggccgttctgctttgggataggatgcgggaatttggaattgaataaaccgggatttaacaaaaaaggagaagaaaaatgcgaaaatcaatgagaatattgttatcagccatttgctttctgctgcttgttttctgcgtttcctcatgtgcggactacacggattacccaggcgatggggaatacctgtgcgaatatccatatttttcataccatatcgacaggcttaacggcagttctgctgaaatcgattataatggaaaaaggataaaagccgatgtcggtatgataggaagttcttttgatgtaagtgacaaagcagacgtaaaaaaggatgaagaaggggagccttatctggacgcggaggatatcatcaggggcgtctggagtacagacaaaaaggggaatattattttggaaattgacaacggcagcagaatcgttctgaataaaaaggctgctgccgaataagtacggacaaacgccgcgggaaatccctgggcagcgaaaacatgttatactttcagctaagaggcttaaaagggcaggggtgatattcccctgcccttgcttcattatttatctgccgtaattgtaaggctacttacggaactcctttttaatgctgcgcaaaaacaggctggaaagggaggcctgcgggtccttatgatggctcaaaaccccgtcgaccgccttgacgattggcaggtccacgctatactgctctcccaggagaatcatcgcgcgtgtcgtggagacgccctccgcgagcttaccaaaacgttcgccctttacatacatttcaccgtaacgcctgttatggctgaattccgagaagagcgtcgcctcgtaatcgcctaaatggcaaagcccgtaagctgacatcgggtttccgcccatcgcctgaatcaggcgcgatatttcgtgcgtgccgcgcgccatcagcgcgccctttaatgacgagcagttaagcccgtcaagcattcccgccgcaattcctacgacgtttttagacgccgcgccgatttcagtccctatcaggtcggttcccaaatagaaacggattagctcgcttgaaaagctgtcgacaagatatttcttgaccgcctcgttgttggagtcaataaccatgcagttcggaattcccttgacaaaatcctgcggatggccggggccgacccatacggcgaccggcgtttccttttcgtctacaaaacctccaacaatctgggaaaggcgcaggcccgtcgtttcctcaatgcccttcatacacagaacaatcggcttgcccttgaggttatactgcgacagccgctccataaacgaacgcagatgctgggagctgatagagataataataatatctgcgtgctctacggcgcgtttcaaatcatccgtaaaaataacgcctgattcttcaaacgacaggtactcgtttttcctctgggaagccagctgcaagtattccggcgcgtccggcaatccccaggaatacacgtcgttcccgattttgtcctgataccacgcgataaacgagccccaccggccgcagcccaaaactgatatattcaaaacagcgcaccacctgtcttttatttccgcattattatatcatatgaaagcgcaaaacgccatagcgggaaataaagttcatagaaaagttatgatttcgggacatccggctggggcagcctgctttccgttggctgcgggttcctttttcgggcgaaaagcgtttttatgcccatcaggagcaaaagcgcgccgaacatcttggaaagcacctcgttgtcgattccccgcgaaaggtaagagcccaaaagggagcctaatacgccaaaaagcgcaaaagggacggcaatacgccagacaatcagctttttgcgctggtagacgattaacgcgagcacggcggtggggaggaagaagagcaggttgatgccctgtgcctgcgcctggggaatgctcgtaaaaatgctcaggtaaataatgaggatgccgccgcccccaagccccatcgcgccaagcaggccggacaaaatgcccgccacggcgctccacagcccgctcaacgcatcagcaggcggatgcctgcccatatcatcagcaatgcgaacgcctttttcaggagcgtttcattgatgcgcggcagcagccacgagccggcagccgcgcccagaacgccccaccatagatagggcgtaacatctgaaaacgcaaccgtgccggaattcaggtagctgaaggcgctaaccacacaaatcggcaatataattgaaacggaggtcgcgtgcgcctttcgctgctccacccgtttattgagaatcggcacgacgaccataccgccgcccgcgcccaaaaggccgtttaaaagtccggtgacggcaccgccgagcatgaaagcaaattttttcatttggcagaatccttttcctacaattaaatatatacagggaaggcaaacctggggaaagcccgctgttttttcttgatttctgtctttattgttttataaatttgcttttctatacaaaagcgccgtgctggtgaaagcacggcgccccttgttattcaattgatacccgcccgaccgtattgcgttgatgataacctgcctacataaaagcaggtgggtgcccgccgcccggtttcacgctcccttcgtccgcataaacgggaggtctgcaatccgccgggggagcaagggctccctgaatatcagttgtagggttatatgaacgcaattcacgcatcaggcaggcagacggctcgcttgccttacaggttttcatcctccggcgcgctttcgtcgtaaagctcttcaaaatggttttcaaagacctccgccagcttgtcgagcagttcctcgtcctcgacctcggtcagaacctcttcgccgtcgtcgtcgaccgcttcaaagatgtaatactcgccgtcggactctacctgctcctcgggcgaatcaaaaatggggtacagcgcgtaatatacgccgtcttcattttcaatgatgtcgaggatttcaaaggtatgctcgttgtcgtcgtcgtcaagcagggtaatcaggtctgctgcgtactcgttatccatggtaatccatcctttcggttctagaccatttactatattaatattttaaccagtcgcgccggttaagtcaagaaaaaatttctttgacaaatcgatataaaaaaatataaaaaagtttaaaaaaagtattgacaatagaaaaaagcgtgttataatataattgaacttaaggaaaggcagaaaatcaaagctgaaagcaaagattggtaaatcaaacatttaaaatttaacccgtgttccattctttagaatacccgaaaatagcaaatgtaaaggttttttggtctttggaagtttcagtaagttggtatctgctacaggcaacaaaaggttcacgttaatctaaaaggtgagtaacggcaatctgaagatgaaaggtacagtttccatttgaaaaccctagggattgtgattttgcaaaataccgcagatgtcagggctttcaagaaaaaaggtttttcatccaagaacagagagtcatttgcaagcgctttggttttcgtagaacggggccgatccttaacgtttaattacaggaaaggggctgagtccaatgggcgaactggcaccggaaagttttccttgcttcgttgatttgaacgaagctcggcatatggctctgatttaagaatatcatacacattgattgcgaaacaaacgccagggaataaaatacatgattattgccctgccggcgtttcaaattgaaacctgatcacaggagagggatatttagaatccgcagccatagaaaacttttacaattgaatatgcgaatttcaatatcgattttagttaattgagaaagaaatttgtcggctgatttttatttggacattaagctcaaaaagcgaaagctccgattccgcaccgttccattggagtatgcggcggttcgggacgacaatggcaaaaggcccttgttacagagtaaagcgttaaggccataaatatgaaaagtgcgtggccgatgattttgggtaaagcatctggaatcaaacgcatttttgccgattgggtgtccggtgttttaagattagtttacatatatactttttctgaagttaatatacgatatgaaagaaaaaatcgggtgaccggtggtagtgtttgccgccggccgcctttttgttttggcgtgagaataccgctgaaaacataaataagttgaaatcaagcgcgttttcgtgtataattttacagcaacaatacaaaatgttctcattttctatatttcggaggctctatcatgcttttgatgaaatgggaggaacttcccgattatatgcaaaacgcagaagtgcgcagatattatgaaatccttcagaataagaaggcaagcctgcttgcaaagcgggcgcttgaccttgtaatatccgttatccttatcatattgctcatcctgccgatgtgtgtcatagcagccgtggtaaaggccagctctcccgggaaaattttgttccggcaggaccgcgttacgacaaacggccgtattttcagaattttaaaattccgtactatggtcgaaggcgctgaaaatttgggcggccagattacggaaacggatgacaggcggattacaaagaacgggaaattcctgcgcaaataccgccttgatgagcttccgcagatttttaatgtttttaccggcgcaatgtcgctggtcggcacgcgtccggaagttccaaaatacgtaaaaaaatatacgcctgaaatgtacgctacgctcctgatgcccgctggggtgacctcttacgcgagcatccatttcagggatgaggacgagctgttccgcgaccctgccacggtggaaaaaaactatatggaggtcgtcctgccggaaaaaatggttcagaatttaaaatatattgaagaattcagctttttatacgatttaaaaattatggtccgcaccgtagcggacgtcttttaatttaagcgcctgtcaaggcgcgtaggaggcgagagcttggccggctttttcaaaaaaaacatcgtcaaccgcttattgcttaacccatcggcttttcgcctgacctatatttttacactttttttctgctctgtcgccgtggtggaatgggcggcagtcacctttaaatatatcctgatggcatgggcgggatatatcttttttttctattacctgaagaacaggcggattttaaatatccgctactgccgttggcttgtgatttttcttatcagcacattgcttacggccctcattcatgtgaccgataattttttaggcaacctggtcatgcttttgcacattgcaatctgtttctttatattttacggcatgcataccgagcgcaacaaaaagcgcgtgcgaaaggaaatgtactggttctgcaagctcatggtaattataacgacggtactcgcggcatgcgggcttccgtttgtccttcttaatatgtacggcgatttctatggctaccatctcatcgtttatgaaaacaggtttacaggcctttatacgaaccccaacctgctgggcttttcctgtgcggtcgcaatcatctgctgccatatgcttacgagaaagaagtttttaaaacacgctggcggaaaaaaggccaacctttggctgctgctgccgtgtgccgcgctcaacctcatatccctgttcctttccgactccaacgcctctatggtgtttttcgttttctacatcgtgttttatctggtgtacagggcgttccggtggcagcaggaaattacgctcaaagaggctgcgaaaaaatttgtacggctttttgcggtctgcctggtggcggctgtctcgcttgtttttgcgcgcgagctctgccagatggcggcaggcggcatcaccacggtcacaacgcagcaggagcctgtgattaacaaggacacgccggacgataaaagggaagggccggtatcctttaaccatctcaacgacaatcttgacagcgggcgcatccggctgctgatggagtcggccgtactcataggcaaccatccgctgtttggcatcggcaaggaaaatttggttctttacggcgaacgctatattgaaggcggccttcatttttcagatttgcataacggctatctcaccattatcgtctgcggcggaatcgtcggctttgtcatttttgtcgcgttcgcgctgcatgtcgcgcgccatattatcaaaagcctttttttggaaaagaaaaacctgggcaagacggcttttcccatcctgtttgcctttatctgcgcctactgcgtttacgcggtgtttgaaaaaacgcttctatttgagcagacgttcatggtcgtttcgttctggctcatgctcgggtatgcaagctgctttatggtacgctatgaccacctggaggacaaaattgagctgaacctcctgcgaaaaagggaaggcgagcaggcttcgctttacgatacgcccaccgaagacgacccgcttgacgagcatgaataggcgcttattgtaaaattagggaaaagcggttataatagaatcgtttcaatcggatttgaggagcggggctccaacacatatattccgcaggaaagccggtgaaataccctctcgcgttgagggtatttttgctattttattccgggaggggacttgtcatgaaagacggttttattaaggcggcggcggcgacgcctgaaatcaaggttgcaaactgcgcccacaacgcacaggcaattattacacagattgagagggccgcgcaaaagggcgcgtcgcttatctctttcccggagctatgtatcacgggctatacgtgcgccgacctctttttgcagcgtaccctgctggacgatgcggagcgggcgcttgcggaaatcgcgtgcaaaaccgcttcacttgatatcgtaagcgtcgccgggctgcccgtgcgctgcgcaaacgcgctttataactgcgcggctgtcgtctatcacggggaaatcatggggcttgtaccaaagaagaacattccggtatattccgagttttatgagtcgcgccatttttctcccggggaagacgcggcggaggccgtcatttgcggcaggaaggtggagcttagcccaaaccttttattccgctgtaaaagcctgccggatttcgtgctcggcgttgaggtctgcgaggacctgtgggtgccgtcctcgccctcaaacaatttggcggaaaacggcgcgaccatacttgtcaatttgtccgcgagcaacgaaaccatcggcaaaccgcagtacaggaggatgctcgtacagatgcagtccgccaagcttgtatgcgcttacctgtttgcggacgcgggttttggggaatcgacaaccgacttaatcttctccgggcacgatatcatagcggaaaacggcgtggtgctcgccgaatcgaagcgttatgaaacggggattgcctatgcggatatcgatttacaaaggctggggggagaacgccgcaggcttacgacctttccctccaagcatgaaagcaaatttaaaacagtggaatttgagctgccgctcaaagaaacgaagcttacgcggacatttagtaaaaacccattcgtaccgcaaagcaagtcggatatagagcagcgctgcatggaaatccttacaatgcaggcgacagggcttaaaacacgccttttacacaccggaatcaaaaacgcggtgctcggcctttccggcgggcttgattccacgcttgcgctgattgtaacggtgcacgcgtttgatttattgaagcttgaacggaaaaatattacagcggtcacgatgccgtgcttcggcaccacgaaacgcacaaaaagcaacgcgcagcttctggcggaggcgtacggcgtcagcttccgcgaggtcgatatttcagaaacggtaaagcgccatttttccgacatcggccatgatgggcatacgctcgacgttacctttgagaacgcgcaggcgcgcgagcgcacgcaggtgcttatggatattgcaaacatggaaaacgcgctcgttatcggtacgggcgatttgtctgagcttgcgctcggctgggcgacctataacggggaccacatgtctatgtacgcggtcaacgcatccgtccccaaaacgctcgtccgctatattacgcagtatgaggcgcataaaagcgccgcgccgctcaaaaaggtgctgctcgatattctcgacacgcctgtaagccccgagctcctgccgccgcaggacggcgtgatttcccaaaagacggaggagctagtcggcccatacgacctgcacgattttttcctctattattatatgcgtttcggctttacgccctcaaaaatttaccgtctggcaaaggaggcttttgagggggaattcgaaccggaggaaattaaaaaatggctcgttgtatttctcaggcgctttttcagccagcagttcaagcgttcctgtttgcctgacggcccgaaggtcggctctgttacgctttctccccgcggggatttgcgcatgccgagcgatgcggatgtttccgcgtggattagggagcttgaagaaagcatggggtaaaagcggatggactttttccatcgcatggtttataataaataaaatcattttgtttaccagcataaggagatgttttatatggatgaattactcaagctgttaagtgaaaattcaaaattcacgccgcatgagctttccctaatcctgggtgaaccgcaggattatatagaaaagcaaatcgaggagtatgaggcaaccgaggtcatcaagggctaccgggccgtcgtcaattgggaaaaggtaccggacgcgggcgttacggcgcttattgagctgaaggtcacgccggaaaaggaaaagggctttgacgacattgccgcgcatgtcatgagctttgacgaggtggacagcgtttacctgatggcgggcgcgtacgaccttgccgtttttgtaaagggacagacaatccaggatatcgcgatgttcgtctcccgcaagctttccactatcgacgcggtgctttcaaccgcgacccatttccttctcaaacgctataaggacagcggcatcgacttttttgaagacgattcggaggaagataaaaggagcctggtactgtgatcaactatgactctatactcaatgataaaatcaaggaaatcaagccgtcgggtatccgcaaattcttcgatatcgcaaatgagatggatcacgttatctccctgagcatcggggagcccgactttaagaccccctggcatatccgccaggcaggaatagaatcgctcgataagggaaaaacatggtatacgccgaacgcggggctttctctcctgcgcgaggaaatctgccgttatttcagccgcaggttccatgtggattacaactgcaaagcggaatgtatcgtcacagtcggcggctccgaggctatcgacatctgcctgcgcagcctgattgaaaagggcgacgaggtgctcataccgcagccgagcttcgtgtgctatgagccactcacgcagatggccgacggtattcccgtaatcatcgaaaccaaagcggaaaacagcttccgcctgaccgcgcaggagcttgaagcgcacatcacgccgaaaacaaagcttttggtgctccctttcccgaacaacccgaccggcggcgttatgcgccggaaggatttagaggaaatcgcgggtgtcatcatcaagcacaacctgttcgtattgtcggacgaaatttacgcggagcttacatacggtgacgagccgcacgtttccattgccgaaattgaagggatgcgcgaacgcaccctggtcgtaagcggcttttcaaaatcgtatgccatgacaggctggcgcctgggctatgcgctcggtccggctgaggtcatctcccagctttacaagctgcatcagtttgccatcatgtgcgcgcctacgaccgcgcagtacgcggcgattgaggcgctcaaaaacggcgacggcgacattgaaagcatgcgcacgcagtacgatatgcgccgcaggctaatggtcggcgggttccagcagatggggctttcctgctttgagccgcacggggcgttttatgtgttcccatgcatcaaaagcacggggctcagctctgaagagttctgcatgcgcctgattgagtcgaagcatgtggccgtcgtgcccggcacggcgttcggtaagtgcggcgaaggctttgtgcgcgtttcctattcgtactcactgacgcacatcagcgaagcgcttggcagaatcgaggaatttctccaggaaatcaaagaagaacaaggatgagttatatggctgtaacggtcagcgcaccggcaaaaatcaatctgacgctcgacatcacaggcaaaagggcggacggctaccactcagtcgatatgattatgcagtcgataagcctttacgatacggtcaccgtagccccggcgagggaaccgggtatcaaaataacctgttcagacagggcgctcccctgcgatgaacgcaacacggcatataaagcggcgcggctgtttttgaaagaaatacaaaaggacgagggcgccgccatatccattcacaagcaaatcccaaaggaagcggggcttgcgggcggcagcagcgacgcggcggcggtactgcttgcgctcaataaaatccatggtgagccgcttgcgcttggcaagctttctgagcttgcggccctggtcggcgcggacgtgccgttctgcctgtacggcgggacaatgcacgcggcgggtacgggaacgcggctgcaaacggtttacagccttcctgactgctttattgtgcttgcaaagccgccaatcggcgtaagtacaaaagaagcctaccgcctgtgcgacggccggccgtacagcgcaaagccgcacagtgaacagctgctcgcgcatttaaaggacggcagcatccaggaagccgcgcaatcgctgtataacggctttgaagaggtgctgcgccttgagccggtcgatgaaatcaaagaaacgttattgtcgtccggcgcctgcggcgcgtgtatgaccggcagcggaccttctgttttcggtatctttacaaacgagcagaaggcttatggctgcgcgcaggcgctcacaaagcaataccgcgaaatctttgtggtcaggccaacgccaaacggctgttttataagcgaaactgaataagaaatcatttcctgcccataatcaaggtatcgatacctggaaagggcaggattttttatgaaaaaaacgataatgaaggcattgtgcttcggcttgattttatccatcgtgttctccgcgctctatttttcagcagagtgcaaaactatttccgacagcgtgctgcggctgcatatcctcgcaaattccgattcggccggcgaccaggctttaaagctcaaggtacgcgacgaaattttaaaaaaatccggcgggcttttagcggcggcctccaataaagaagaggcggagcggctcaccgcgcagcagatgcaggcaatcgtggacgacgcccaggaattcgtctattcgcagggctatgattatgccgttacggcgagcctgctcaatatgccctttaatacgcgcgtttacggcgatatcgccatgcccgcgggcaattacgacgcgctgcgcattacaatcggggagggcgcggggcacaactggtggtgcgtcatgtacccgcccatctgcctgccggcggcggaagaaaagcaggagctttccgacgtgctcgacgacgggcagctccagatagtcgaaaacgagccgcagtatgaaatcaagttcaaatttgtcgaaatatacgaaagcatcgcgcagttttttgcgggagaaaaataaaccactttcctcatggcggaaaaaaaggtataatggtactatcttgtatttaggccggtggtactatgctgcaatttattatggggagaagcggaagcggaaaaaccttttatcttaccgagcaaatctgtaaagcggtcgaaagcgggcaggcttcttccgtgctgtttctcgtcccggagcagcagtcctttgaaatggagaaaacgatgctgaacctccttggcccgaaggactgccgcagggtagaggtgttaagcttcagccgccttaccgactttgttttccgcagccgcgggggggtaggcgggcgggctgttgacgacggcgcgcgcagtatcctcatgagccttgcaatcgaacaggcgcaggacgagcttacgctttaccgcaggcaggcgggcaggccggagctgattcccctgatgctgggtgcggtaaaggagtttaaaatgtgcgctgtgacgagcgacatgctgcgcggcgcggccatgcggtcagacgacggcgtccttcgccaaaagcttacagaaacggctttgatagccgatatttataacgcgttattaagcgagagctacatagacccgctcgatgacctgacgcgcctgtatgaatcgatattaagcacgccgttttttacaggctttcagatttacgccgatgggttcagcggctttacggcacaggagcagaaaatcatcagcctgatgatagcgcagtcggaaaaatttactatcgcgcttgctggagacgaggcggagctttccgcaaagaacgatttgttttttaccacagggcgcaccaaacgcgttttaagggacatggcaaaggcgcaggatattcaaatcctgcctgatgtaagccttacggaagccaagcgttttttatcgggcggtatcgcttacctggaagagaacatataccgcccgggaacgcctccctgcgtggaggaagcgcaaaccggcctgtcgctttataccgctgaggatgtgtacgaagaatcggactatatctgccgtaccatccggcagcttaccatcgaaaagaatcaccagtatggcgatattgccgtaatttgccgctctctcgacggctaccgcggtattctcgatacaacgctcgagcagtacgggatatcctattttatggacaggccgcaggacattgcgtcaaagccgctcattcgctttgtcctttccgcctttgactgcgtacatacctatttttcctcggaaagcgtgttccgcctgctgaaaacggggctgtgcggtttaagcgcggaagagacggcgctgcttgaaaactatgcctttgtctggaatatttccggcggcaggtggatgagcgaatttacccagaatccgcgcggctacgcggacgaatttacgcagcaggacaaagaagagctcaaagaagcggagcggctgcgcgccgtaataaccggcccgcttgcggattttaaggagcggattgcaaacagcgacggcgcccatatttccagggcggtttacaggctgctcgaggcgttccatgtcagccgcaatctgcaggagcagtcggacaaacagcgcggcaaggggaacgcttcccttgcgcaggagcaggaacgcctgtgggatatttttattggtatcctcgaccagatggaacagcttttgggaacgaaacggctgccgtccaagcgctactgtgagcttttgaagctgatgcttcaaaacgcggagatttcgtttatcccgaacagcctcgacgaagtaacgataggcacggcggacaggattcgcctgagctcccccagggccgtttttgttatcggcctgaatgaaggggagttcccgcatctgcccgtttcgagcggtattttcagcgacgcggagcgcaggcggctgatttccatgtcccttccgctctacgacgcggtcgaggagctgggcgcgcaggaaaagttccttgcctactgcgcggtgagcgcgccgagggaaagcctgttcctctcctgtgtggagaacgacctgaagggggaagcgaaggcgccgtcctcgctttttcgtgaagcgctgcggcttttcccgcacttgaacgctgtaaacggcagggaaatcccatggacgcaaaagctttgggctgaaaagccgtcgtttgagctttgcgcggagcatcataaagatgatacggccgcgcaggagcttataaatcatcacttcctgcagcttgaagggtatgccccaaaaataaacgcgcttttgcgcgcccaaaatgaagagccctttgccgtcagccggaaaaacctgagcgaaacgctgttccataaagaaaagctcaggctttccgcgtcgcaggttgaaaaattctatcaatgcccgttccagtatttttgccgctacggcgtgcgtgcgcaggagcggaagcccgcgcaaatcgattccgccgagtacggcagccttatccatttcctgatggaaaggctgttgaaaagcagcggtatcccgcagctcgcttccctttccgaacaagagctcaagctgcgcctcgacagcttgacggaagaatacctcaatacgcatttcggcggcgcgcaggataaatcaaagcgctatctttccatgctccgccgtatgaaagattccgcgctcatgcttataagccatatgctcaaggagctttcccaaagcgatttcctgccggaagcgttcgagcttcatttgggggaggacggcgatatcccgccgtatgaaatcacgcttgcagacggcggcagagtcgtgattgaaggctatatcgaccgcgttgacgtcatgcgcagggaaggggctgcatatgtccgtgtcgtcgattacaagaccggagcgaaaaaatttgtactgtctgacgtggacttcggcctgaacctgcaaatgcttatctacttatacgcgataacacagaaggacagcaaaggggcagtacctgccggcgtactttatatgcctgccgcttctcctatgattaacgcagagcaggatgaaagcgtggaatccatcgataaaaagcgcgcgaaggcgtaccggatgaacggcgtgctgctcgatgatatcgacgtaatcaaaggcatggaggcggacggccggggaatatacatccccgtcacgctcaaggaagaaaagccgaaaaagggagaaacgcgggatacggaaacgccccttacgctcaaggtggacaagggcggcgaatatcttgtttcaaaacgagagcttcggatggttttccaccggattgacgagctgattaccggcatggcgcagcgcctcttttccggtgaaatccccgcaatgcccgccaagggaacgtacgacgcgtgcaaatggtgcccctatacgtttgcgtgcggctatgaagacggcatggcgtgcgtagaggttgcagaggataaaaccgcgttccatatacaggaagggcaagcggataaagggaaggaggaaagctgatggcacagaaaaaatggacgcagggccaaaagaacgccatttatgcgcagaacggttcgctgctcgtttccgccgcggccggctccggtaaaacagccgtgctggtcgagcgtgtgattgcgcgcattacagacccggataacccggtcgatgcggaccggctgctcgtcgtaaccttcacgcgcgcggcagccgcggaaatgaaggagcgcatttccttgaagcttgatgagctgatagctgaaaacccgcttgacagcgcgctccgccgccagcagctgctcctttccaaggcgaatatcagcaccatccacagcttttgcagcgagcttgtgcgcgaaagcttcttcgcgctcgacatttcgcccgatttccgccttgcggaggagagcgagcttgctattttaaaggcggaggccataaataacgttctggaaaacctctatgaaaacgagggggaagccttttcgctctttgccgattatttcagcaccgccaaaagcgactacctgctccagcaggtggtgcttaagctttatgagtttttatgcgcgcatccgttcccggaaagctggctgcaaaaaaaggaacagatgtattccagcgaatgccctataacagaaacacagtggggaagggttactgtggactacgcgcaggacgccgcgcgcttttgccttgcgctcgctgaaaattccctggcgctgtttgaagaaaggccggagctgggcgacgcactgcgcagccttttacagctcgacctgaaatttacgcaggggctttgtgaaacggtggcgtcctcccagtgggatgaaatgcgcggctatctgtcgtcgtttgatttttccgcgcgtttccaaagcgcgcgcggctataaggacgacgccataaagcttaaaatacaaagcagccgtgatttgttaaagaaaacaatcaaaagcctctgctcgctctttacccagagcgagcagcagtgccgggacgatatccgcgagctcgcgccgctcgtacatgagctgttttccgcggtgcgccttttttcgcgggagtacgaaaagctcaagcgcgaaaaaaatattgccgatttcaacgacctggagcactgggcgctttccctgctcgtaaccgagacgccggacggcgctgaatttacgccgcaggcgcaggcggccgcgcagcggtttgcggaggtcatggtcgatgagtatcaggacgcaaatgaaatacaggacttgattttccgcgcgctgagcggcgacgggaaacgcctgtttgtcgtaggcgacgtcaagcagagcatctacggcttccgccaggcgatgccggaaatttttctgcgccgcaaggacgcatacgcgctttatgacccggcgcttgacaattaccccgcaaaaattatactcgataaaaatttccgcagcaggcggggcgtaaccgatgcggtgaactttgtattccgccgcctgatgtcaaaagaggtcgggggaatggaatacacgcgggaagaggagctggcagccggcgcgcagtacgaggcggacgcctcccccgacatggctttccacctgctcgattccggcgcgcaggacgaggattgcgcggatattctggaagcgcgccacatcgcccgcatgatacataagaatatggagagctatcaggtgacggaaaacggcgtccggcgcgcagcgaaatacagcgacttctgtattttgctcaggagcgccagcacgcacgcagccgcatatgtaaaggagcttacagcgcagggaattccggcctcgtctcagtcgtcggacggcttcctctgtgcgcgggaggtcgcggtcatggtttccttcctgcgcctgattgacaatccattacaggacatcccgcttttaaatgtgatgatgagcccggtttacggctttactccggacgaccttgcgcaaatgcgcatcgcaaagcccaaaggaaggctttattttgcactcaagtcctatgcgcaggaggggagcctcccggcccggcagctgcttctcgatttggacgattgcagggcgctcgccgcgacggcgcctgcagacctgctcgtccattttatctacacacgcacggggtatcccgcgctggtacgttccaggcgcagcggggcgctcgggctttcgaacctgcgccttttgcaggaatacgccaagaattacgagcagtcgggaggcggcggcctttccggctttgtccggtatatcgaccgtttggaggaacagggctgcgacctgaaaacgaacgccgcggcactttcgcagtcggaaagcgtcagggtaatgagcatacaccattccaaaggactggaattcccgttctgctttctcgcggcgaccgcgcgcagcttcaacagcgacaaaaccgacgaggtgctcctccacgccgagctgggtatcggcatccgccggaaggatacgcagcgcatgtgccggtattccaccatgccgcgcggggcggtttctttggagcttgaacgcgacggaaaatcagaggagctgcgtgtgctgtatgtcgcaatgacacgcgcaagggaaaagcttattgtgctgtccacccaaaagaatccgcggcgctatcttgaaacgatggcttcccggctgacgggggaaagcgcggtgctgccgtatattgtacgcggcgcctcctgtatttccaactggattacccagtgcgcgctgatgcatccggacggggcgtgcctgcgcgagcttgcgggtatgccgcgcgcaatagagtgcgagccctgccttccctgggaaatcagcataatcgaaggggaaacgcccgctgcggtacaagagcctgcaaaggccggacaggcggaaaaaaaggagcctgcccagcccttggatattacgccggttgtccggcggattgtatcagaatatccgtaccaaacgctcggcgcgattcccgtaaaggtttcggcttccgagctttcccatgaggaaagccgcggggaatacgctttttccacgcggcctgcgttcctgcaaaaagagaaaatgacgggagcgcagcggggaaccgccctgcacgctttcatgcagttcgcggatttcacggcctaccttacttccccgcaggaggagcttgcaaggcttgtggaaaagggctttatcacaaatgagcagcggcaggccataccgctcaaggaaataagcgcctgcctgcaaagcggtattatgcggcggttcctgtgcgcggggaagcagtacagggaatttcgttttacggtaaaaataaaggcgggcttagctgataaagagctgaagccgccttattgtgacgaagcgattattttacagggcgcggtggactgcgcgtttgaggaagcgggcggcatcgttatcgtcgattataagaccgaccgcgtaaagaacctggaggagcttagaagccgctaccacacgcagctggagctttaccgctgcgcgatggagcagtgcacgggcctgcccgtgcgcgagtgcgtgctgtattcgttccacttaaacggttttatcggggtttgattcttacaaaaggcccttttcctgcggcgaagcggacaaggagatgattttttcctcaacctgttcccgcagggagcgcggccgcatcacgtacagcctgtcgctgtagggcagaagccaatcgacaagcccgtcgctgatatagacgccggcgcgcagaaggaaccgccccttttccttgttgatgacctgcgcgtccgtcccgaaacggtcgagcacgacgtcgagcaggctgtttttgcacagcagctcaatctcttcctggagccctgggtacatcatcatgtttttcctgacataatcagccgtatcaaaggcgccggcgtagccgctcacctgttgatgcggccttatttttttatctgtaagctgtgccatgcgcatacggtcaagccggtaattgctcaggttatcgtacttttcatagttgccgacgagataataaaaatcgttcgaccacacaagcgcgtatgggctgatttcgaaggtgcgctcggtgcgcagcacggcacggttatcctcgatatgatagcggcagtaatcgaaccgcaccttcttttcctgcgcaatcgcgcggtttattgtatcgatgatataataaatctgctcgttttggaatttcagacggttatctataaagatttggctgtcgatatcctgcgcttgatagccgcttaaaaaccgcataagcctgcggcttaattcctttgtctttttttcggtgataaaacgcgcgctcaaaatcgcgtcgagcagtaggcggacctgcgccgtttcaaacgcgcgctccccaaggaaaaagccttcctttgctgcgtacgcgcgtgtaatgtcgaaaccgtattcacataatgcgccgatgtcgtcataaaccgatttgcgcgcgcaggtgatggagcgttccgagagatattccataatttttgccgccgttaccgggtgctccgaatcgctgtatttatctaagtattccaaaacatataaaagccgcagccgcctttcatactggcttttttccaaaacggaccccttcttttccaacttattttaaaatagcctccgcgcatttgataccgtcaaccgccgcggaaacgattccgcccgcgtatcccgcgccctctccgcatgggtaaaggccatgaagcgccaaagattccatcgtttccccgcgcaggatgcgcacaggggaggagctgcgcgtttcaaagcctgtaagcagcgcgtccggatgcgcaaagccctttagcttcctgtccatttggtggattccctgcgcaagtgaatcagaaagataaccgggcagaagcccgcgcatgtttgcaaagcagacgccggggcggtagctcggctttatgtctccaaaacggagggaaatcctgttttcagaaaaatcgccgaaccgctggacaggcgcgaagtaaccttcgccgcccgcttcaaacgccaaacgctccagcgcccgctggtattcaacaccggcgagtacgtcctcgctcccgaaatcgtcaggcgtaacgccgacgagcaccgcgctgttggagttctccgcgccgcgcgcaaactcgctcattccgtttgtcacaacgccgccccgctcgctggcggcggctacaaccgtaccgcccgggcacatgcagaaggtatagacgccgcgcccactgggcaaatgcaccgcaagcttatagtccgcggcgcccagcttcccctttcccgcgcacgcgccgtactgcgcataatcaatctgttccctcaaatgctcgatgcgcacgccaacggaaaagggcttctgcgccatgggaacccccatttcactgagcatggtaaacgtatcccttgcgctgtggccgaccgcaaggacgatatgtccggtttcaatttcctccgtgcgcgctccacgccgcacaacagccgccgaaaccgcgccgtttaccgtttttataccggtaagcttcgtttcaaagcagaacgctccgccgagcgcgataatctgctgccggattcccttcacagcctgcggcagcctgtccgttcccacatggggcttggcgtggtataaaatttcgtccggcgcgcctgccttcacaagctcaagcaggaccttacgggcgcgcgtatccttcgtaccggtgttgagcttgccgtcggaaaaggttcccgcgccgccctcgccgaactgaacgttggaatccccgcatagcccgccgccgtcccagaatgcgtgcacgtcctttttgcgcctgtctacatctttgccgcgctccagcacaagcggctccgcgccgcactgtgcaagaataagcgcgcagaaaagccccgccggccccgcgcctgcgataacaggccgtaaaggaagcttttttacagcgggcggcgcatattcgtacggcgccgcgagcgccgcgttcctgtttttactgcggtttaatattttctgttcgttttgtaaaagcgttacgtcgagagcagcccggaaatgcacatcgtttttatggcgggcgtccacgctcctccgaaatagcgcggcgctttcaatcgcccctggttcgatttgcagcgccttcgccgcggcgtttaaaattgtcttatcgtcgtaatcgagcggaagccttatatctgttatccgtatcatttgtaatcatccttttgcagatacccaaaggcgtgttttccagcgataattccggacgtccacgcccagtgcaggttatagccgccgcatattccgtccaggtcgagcagctcgcccgcgaaaaacaggccgtctttttttcttgaggccattgtatcgatatccacctcaccgcgtgggactccccccgcagtggcctgcgcctgctggaacgagccgggggaggctgcttcaaattcccaccccttgagtatttggcagagccttttaagctcccgttcctttatttctgccgcacagcggttaagcggggcagcgccgctttccttgagcgcggaaagggcgatacgcttgttcagaatgccggttaaaagctcttctgcttgaagcttaccttcttttatacgatgagaaagctcgccgaaaagctcctggtaactgatatccggcagcaaatcggcgcaaagaataggcgcttctccctggcctaatagctgcgcgcattggcgggaaagctggaatacgcaaatgccggaaagcgcgttttccgtaaactgcagctctccctgctcccgcgctaaggcatgcccgccgtttttgagcgtaacgctgcacatacaccgctgccctttcagcgaacgcagcgcgccgctttttacaggtacggggcagagcgttggaaaaagctttgtgcaggtatggttaagctgttttaaaagcccgtagcctgcccggccgccatccttggccgcggccttgccgcccgtcgtcataatcagggcgcggcagctgattgtgctgtcttcgctatgcaaataaaagaggtttttctcctgtgtgattttatctatatccgtgctgcaaagctcctgcacgccgtattcgcgcagggcaaggcgcagcacgtcgagcacggagcttgcgctgctgcttaccgggtaaacacgcccctcgccgtccgccctcgtataaaggccgagcgctttgaaataatccctgatataactgcagtcaaacgtttgaaacaggcgcgcggcgccatccgcaaggcttccggaatattgcccgcgggaaatcagaaggttgctcaggttgcacctgccgctgcccgttgtaagcagctttttcccaacacgcgcgtttttttcaacgaccgcaatttttatttttccgccggagcaccgcgcggcgcttaccgcggcgataagacccgcggcgcccccgccgagtatggcaatatccgtatggtaaacgttcttttgcgccatttcctcaccctcaaatcaaaacgggacaaccagcgccggttgccccatcgtgtgcttgtatcttttaagcgcccgcgaagaacttaaccattgcgggaattccatagctgatgatgctcatgataaccgttgcgcccaggacgccgagggaaatgcttattatcgcgtccttgagcttgaatttgaacagcgccgcgacgagcgcgcccgtccacgcgcctgttccggggagcggaatcgccacaaacaggaataagccaagctttttatgcttcataattttatgcgcgttcttttccgccttttcttccagcttattgatgagcttgacaaagcgcgtatccttgagccacgcgaatattttttcaataaacagcagaataaacggaatcggaaggatgtttccgataatacaaattggaatagcagcccaaaggtctactccaaacattgatgcggctatcaggccgcccctcaattccagaatgggacaaagcgaaataataaacgcgacgagttctcctggaatgccggacattgcgctggcaattgactcaatgagttgttccaaatccatacctccgtaaaatcgataaaataatctcaactattatacatgctttccctgccctttggcaagtaaaatccctgtaaatttacagccttgacataaaaaagcagattcattagaataaataggctggaaagggtgtaattatgaacagaattcaaaaacattggaaagaaaacagggcggggcttgttttgcttttgctcacggcgctctttatcctttttatattctcgagaagtatggttccgcaggcggcctctgcgcaggaaagcggctctgtcgtcagcgtgctcggcagcctttggagcgcgcttggaatcgatgaggacagcgccgaccatatagtgcgcaagcttgcccattttatcgaattcatgtgccttggcgtcctgcttacgctgtgcgcgtgccataacggggacagaaagctcaggcggcatactttccccgttttgttcttttgtttatgtattcccgtgatggatgaaaccattcaatacttttcgccgggccgcgcgcccgaggtgcgcgacgtcgtgctcgacttcagcggagctgccgcgggtttcattgttgtcgcttttatacgaaaaatttgcaaaatgaataaaaagaaggaaaaaattgcaaaataagaagtcttttattgaaattcgggcgtgaatgctgtataataaacgcttgtaacattatgggataggatgtgtgcgaattgtttaaaattgtagaaaaaacacccctgaatccttccatgacaagaatggtagtcgaggcgccgtttattgcaaaaaaggcgatgcccggccagtttatcattctgcgtgtggatgaattcggcgaacgcattccgctgacgattgccgattacgacagggagaagggcaccgtcacaatcatatatcagaaggtcggcaaaacgacgatgctgctcgatacgctcggcgccggcgaatacatactcgattttgtcggcccccttggcaaagcctctgagcttgagggctaccaaaaggccgcggtcatcggcggcggcgctggctgcgccatcgcgtacccgcaggcaaaggccctgcataatatgggcgcgcatgtcgatatcatcgcggggttccgcaatgaagagctgattatattaaaggatgaaatgcaggccgtgagcgacgagcttatcgtcatgacggacgacggctcaaacggcaataagggctttgtcacagacgccctgctggagaaaataaagtccggcgcgggatacgatttggtgattgcaatcgggccgatgccgatgatgaaggccgtaagcaacctgacaaaggaatacggtattaaaacaatcgtcagcatgaacaccattatgattgacggcacgggcatgtgcggcggctgccgcctgacagtcggcgggcagacgaaattcgcctgtgtggacgggccggatttcgacgggcacgaggtcgacttcgacgaggcgatgaaacgcgccgccatctttaaggaccaggagcagaaggccgcaagggaccctaactgcagattactcagaggtgagcacaatggctaatatggtaatgacaaagacgcccatgcccgaacaggcgccggacgtccgcaataaaaacttcaaagaggttgcgctcggctatacggaagaaatggccgtttttgaagcgcagcgctgcctgcactgcaaaaataggccatgtgtttccggctgcccggtaaacgtgcccattcccgagttcatcggccatgtggcgaacggagaattcgaggaagcctaccaggtcctctcttcggcaaactccctgcccgccgtgtgcggaagggtatgtccgcaggaaacccagtgcgaatcaaaatgcgtgcgcggcatcaagggcgaaccggtcggcatcggcaggctcgagcgctttgtcgcggactggcatatggcgaacgtgaaggataaggcaaagcgcccgcagggcaatggccataaggttgccgttatcggcgcgggcccgtctgggcttacctgtgcgggcgaccttgcaaaggccggctacgaggtcacagtattcgaggcgttccatacggccggcggcgtactgatgtacggcattccggaattccgcctgcccaaagcaattgtccagaaggaaattgacggcctgcgcgatttgggcgtggatatccagaccaatatggtcatcggcaaggtgctgtctgtcgacgagctgttcgagatgggctttgaagcgatgtttatcggtacgggcgcgggccttccgaattttatggatattcccggcaacaacctgacgggcgtgtactccgcaaacgagtttttgacccgcatcaatctgatgaaggcctatctcgacgattacgacaccttcatcgttaagcctaagaacgtggcggtcatcggcggcggcaacgtcgcgatggacgcggcgcgcagcgcaaagcggcttggggctgagaacgtatctatcatttaccgccgttccgaggaggaaatgcccgcgcgaaacgaagaaatccatcacgcgaaggaagagggcatagcgtttaggcttttgaacaaccctgtcgcgatgctcgacgacgggaccggaaaggtcgggaaaatcgagtgcgtcgagatggagctcggtgagccggacgaatccggaaggcgccgtccggtcgagaaaaaaggctccaacttcacaattgacgtcgactgcgttattgtggcaatcggcaattcgccgaatccgctgattcgcacgacgacgaaagggattgaagccaacaggcgcggctgcctggtcgtcgaggaggacaccatgcgtacgacccggcagggcgtttacgcgggaggggacgccgtaacgggcgccgcgacggttatccttgcgatgggcgccggaaggcaggccgcaaaatccattgacgaatatatcaagagcaaggcctgacggttttgtttataagaggttttttatgagaggcggaggttagactccgcctcctattatacccgtaacgctttcggggaagtataaagagaagttaaaaggagagggatgagaacgtggaacaaacaaggaataataaaatgggctccgccccaatgttcaaattaatcatgtcgatgtcgcttcccgcgatgttctctatgattatccaggcgctgtacaacatcgtggacagcatcttcgtcgcgcagattaacgaaaacgcgctgaccgctgtttcacttgcctatccggtgcaaatgctgattatttcggtcgccgtgggtacgggcgtgggcctcaattcgctcgtttccagaaggctgggcgaggggaagcaggaggaagccgacagcgcggcctcccatgggctgtttttaggcatcgccacatggatagtttttgccctgctcgggttctttttgacagatacgttctttcatatgttcacagacgacccggaaatttttgcaatgggcacccaatatttgagctgcgtcctgattttttccgtcggtgttttcgtagagctgaacctcgaaaagacgctccaggcgacgggcaacatgatttacccgatgctctttatgctcgtgggtacggtaacgaacatcatcctcgacccgctgtttatcttcggcgttggcttctttccgaagctcggcgtactgggcgcggcggttgcaacggtaatagggcagattttttccatgattttttccatttatgtcatgttccgcaaggagcacgacgtgcatatccatttcaggcatttccgtttcagcctcgacacggttaaaaatatttacgcggtcggcttcccgtcgattatcatgcagtcgataagctccgtcatgattttctttatgaacggcatactgattgctttctccaattccgccgtttcggttttgggcgtgtactataagctgcaatcctttgtgttcatgccggtgtttggcctgacgcacggcgttatgccgattatcggcttcaactacggagctaagaaaaagcagaggatgctctcggcgctcaagtacggctgcctgattgcgttcgttattatggttgccggcaccgcgctgttttggattctgccggagcagcttctgatgatgttcaacgcgagcgacgccatgctttctatcggcgtgccggcgcttcgcaccatcagcatctgttttattccggcgaccatcggtatcatgtttacaacgctgttccaggcggtcggaaagggcatccgcagcctgtttatttctgtgctcaggcagcttgtcatcctgctgcccgcggcgtaccttttgtccttcgcggggctttcctacgtctggtacgcgtttccaatcgcggagctcgcagcgctggttgccgctgtcctgctatacgtgggccttgtgaaaaaagatttcaaaaaacttgatatgcccacggaaaactaaacatctttgtccacccttccgcatactattattaaaagcttttttaggaagtggtggcaatatgaatgacgaacggtatgacagcatcgattatgacgccggttggcagacgacgcaaacggtttcggcggcgcccgtaaaggcacagctataccgcggcgccgacgatttttccgacgatgaagaggaagacgcctacatgacgcgcagaagaaggcgttatgaggacgaggacgaagaatatgaagagaaggaaaaaaagagcagggcaaagcagccgaaaagcggcacgcaggtgcttatcaagtatcagctgattatctgcatcattgcggcaatcgccgcgttcgcgctcaaatcgttcggcggccagatttacgagatggtcgacagctggtatacggcgcagcttaattcttccctcgtggttgaggcggggaatttcttctgatgtcctttacgctgtttggctgtaatataaaagtaagctatccgctggtggcggcgctgacagcgatttttatttttgacagaagcggttcggcactgatttgttgtctggccgctttttgccatgaaatgggccatttgactatgatggcgctttgcaggacgaaaacggagcaaatcaggctgagcctgttcgatgtaaaaatcagcgacgcgggaaaataccagaggagcttcccctgcgagatggctgttatcctgggaggggcgggctttaaccttttgttctgcggcatctcgcatttgctgtttctttggagcggatgggaggctttctccctgtttacctccgcaaacctgtttttggcggcgttcaaccttatgccgattgaatcgctcgacggcggaaacgcgctttatttgctgcttttgcgccatatgcgccacgaatacgtaattaaggccattgaggtgttgtcctttatcgtgctgcttccgcttgcagccgcgggcttttttatcctgctccagtcgaaatataattttacattgctgtttacaagctgctacctgatgggaattattttactgaaaaatacaaagtttaaccccggaagcattaagtgaatgctttccggcagggtgcttcaaacggaaaacaggattttattgcgttttcgtctgtcaggaggaatgctcagacagttttatgcagcaaaaaggtttaaaaggacgcgctgcaccctttatgtctttgaggctaagaattggcatggttcggggttcgcaaaccaagcaatttctcaatcgggccatacggccggtgatgtccgcccatgctgcaagccggtttatctgaatatttttaaatcggcattggatagggtgccgggaaaataataccggcatatatgatatagtccttcaagcgccgcttttccccatgcaaagcggcgctttttaagtgcgtcccattcctgctttggcgggtttaccgttgcattgcgtggcgaaacccgttataataaattactaaggctgtattttggccgaattgtaagaatacgggagaaaatagaatgaatcaagagcttgaaagattattgctgaaggtgcaaaagccgggaaggtataccggcggggagccgaacagcgtcataaaggataaaaatgaaattgatgtccgctttgccttctgctttcccgatacctacgaggtggggatgtcgcaccttggcatgaaaatcctctacagccagttcaatgagcagccgtatttatggtgcgagcgcgtttttgcgccgtgggtcgatatggagcagctcatgcgtgagagcgatataccgctttacgcgctggaaagcggcgacccggtcagggactttgactttatcggctttaccctgcaatatgagctgagctatacgaacgtgctcaacatgcttgcgcttgccggtatcccactgtgctccaaggaccgtacggagctgttcaacatcgtcgtggccggcggaccctgcgcctgcaacccggagcctatggccgaattcatcgacctgttttttataggcgaaggggaagaggtcgaccttgaggtaatcgagctttaccgtgcgtgccgcggtacgggtgaaagcaaggctgactttttgaggaaggccgcaaagattgagggcgtctatgttccgtccctctacgacgcagcctaccatgaggacgggacaataaaggcagtcacgccgaaggacggcgcgccggaaaaggtaaaaaaacgcctgattatggatttggacaagctttattatcccgaccggttcgtcgtgccgatgattgaaatcgtacacgacagggctgtgtctgaaattttccgcggctgtatccgcggctgccgcttttgccaggcggggttcctttaccggcccgtaagggaaaaatcaccggaaaccatcgacaggcagtgccgcgcgctttgcgaaaatacaggctacgacgaggtatccctgtcttccctgagctcaagcgattattcccaaattgcgccgcttctgcaaaagctcacacaatggtcggacgatgaaaacgtaagcctttcgcttccttcgctccgcgtggacggcttttccgatgaaattttgtccaagcttaaaaccgtgagaaaaagcgggctcacttttgcgccggaggccggaacacagcgcctgcgcgacgcaatcaacaaaaatgtggaggagcaggagctgctcgacacctgcgccgtcgcttttgcgggcggctggacgacggtaaagctttattttatgcttggccttccgaccgaaaccatggaggacgtcgaagggattgcccggcttggtcagaaggtagtcaatgtgtattacaatacggaaaacagggcaaagggcaagggcgtgcgcgtaaccgtcagtgcctccagcttcgtaccgaagccctttacccccttccagtgggaaccgcaggatacaatggaaatgctcatggaaaagcagaaacacctgaaggagtctattacaacaaaaaaaatcacctaccattaccacgattcaagcacgagcttcctagaagcggtatttgcgcgcggcgaccgcaggctgtccgccgttttaaaaatggccgctcagcggggcttccatttcgacggctggagcgactgcttccgcctggaaaattggatggagctctttgaagaatgcggcatagaccccgcgttttacgcaaaccgccgccggagctttgacgagacgcttccctgggaccatatcgactacggagtgaaaaagaattttttgatagaagaatgcaaaaaggcctatcaggcgtccgccacgccgcactgccggctgaaatgctcaaactgcggcgcggcccagtggaaagggggcgtctgccttgaaaaacgttagggtctggtttacaaagagcggcagggcaaaatatatctcccatctcgatttaaaccgtgttatgctgcgcgccgtccatcgggcaaagctcccgatttggtatacggaggggttcaacaggcatccgttcattacgtttgcgctgccgttgtcgctcggctacacgggaatgcgggaaagcatggacatgcgcctgctcgaggaggattacccatccgaggaaataaaggccgccttcaaccgctgcctgccggacggtatccgcgtggtcgatattaccgagccaaagatgaagccggcggcgattgcccttgccgattttgaaatccggctgtcctcccgcctggacgcggaagctcttgaagcaaaaatacaggcgtttttggaaaagggcgaaattctggttgaaaagaaaaccaagtccggcatgaagcaaatcgacatcaggccggatatcaagtcggtggaaatccggcgggaggggaacagcgctttgcttcttgcgcggctgtctgccggaagtgcaaaaaacctcaacccgtcgctcattgtaaaggcaatggaagaaagcttcggcatagcgcttttttacgaaataacgaggattgatatttacagcgaaagcggtgaacgttttgaataaggaacccagattccatacagtcctgatggacgctgacgagacgctgctcgactttacccggtcgcaggaggaggcgctcaaaaacacgcttcacaaaaacggttatcgatggagcagggaaatcaacgaaatttacagcgcggagaacctccggctctggaaaaagttggaacggggggagactacgcgcgagcgcctgaaggtggagcgctttgaaaactttttccggaccattgggatagagggcgcggatatacaaaaaataaacgaggattacgtcgaatgcctttctcggtgcggctttgtgacccacggcgctttggcgctgtgcaagtctctgcacgggcggtgcgggctttatatagcgaccaacggcctgcgtaaggcacaggaggggcgcctggagcgcagcgggctcaagccatatatagacggtatgtttatttccgacacggtcggcttccagaaacccgcgaaagaatattttgaatatattttcaagacgcttcaaatcgaagataaaggcgatgtcataatgcttggcgattccctgacctcagacatgcagggcggaaaaaatgcgggaattacgacctgcctgttcgacccaaaggaaaaaaccgccatgccgcacccgctgtgcgactacaaaataaaaaggctttcggattttgaaacgcttctgtttgactgagaaaaacgctgccggaaaggcaaaaattaaaccgagcagccggaagtggaaaatttttttattttcatattgattttttcgcgcgaatcggatataatagtcaagcgtcaaaaaatcatatggagagatgtccgagctggccgaaggagcatgattggaaatcatgtgtacggctaccgccgtacctggggttcgaatccccatctctccgccacatcggagcaagcgaaacgcttgctccgtttttttattataaattaaattgagagaaagagggaatatgatgaagccctttcagctggcacaagggaactctgttttaaatctggatggaattcatgagtgctaccaggtggaggaatcggtacgctcctcagacaatgctccgtattacatattgacaataaatatcagctttgagaaccttttgcccttactggaaagattctgcatgcatttggacgaaccaggttttttcttttgcgagctgccggcggccaaggcggaagaagaaaagctgagggaatctgaaaaatcccccttccattataaggtatactataaggacggatgctgccgtgaggagctcttggctatactcggaaagtacgggaaatggtttttgccggatggaatggcttgctttgggtttgcctctcatataacaaacgatgaaatttatgtaatgaaatataaaattgtcagaatatatacccggaatttgcaaaagtatcaagcgatgctcgaacacttccaagttccccgtgaagaaaaaattcaaactgtatggcaaaattttacgcctgaagctccgggaagatgctccctggaaaccattgacggaaagacggtttatgatattgtcaaagaattgatggaaaccggcctgtattttgcacagctgcggaaagagtaaagcgatataacgattcagctttttttaatttacagaaacaagccggccgataatacggttaccggccggcttgtagtaagagccttcctcagccctctatcttagtaaatgcgggcggttacggctttaaaagccagaaataggcaaaaattgctgccagggccgagccaatcaggttgaacaggatatccatatcggtatccataaggcccttttggcttttttccgtattcttgagcttttcctgcctctttttggaggtctttttgtcgtggcgcatctctatcagctcaaaaataatcccaagcgtgttgccggccaggaaaacgaataacgcccgaaacagcagcgagcctccgtcctctatataatgaacgaggatgcagtatgtcagcaaggaaaaggaaaatgagccaaagccatgaagataacggtcaaaggttttagactttgtataataatccagataatgcccgaaaaagcaggctcccaaaattgtaagcattgtgagcagcagcaggtaagacggaaccgctatttttaaaatccatattgcaagaaaaacagccgtataaaaaatataaacggacaatgccgactttgcatatgtttttttcttaacttgaaacagccttacaatagaaaaaatgcatagagcggataaaatgcagtaagaaacaataagccaaacaggcacaacgcgtcaccttcaatgtgtaataggatagcaatccgttgttagtgtttgtgtaaacagaataaaatatacagtccgcagactgccgccgcttttctaaagctgccgtccgggattaagtccatacgccaagggccgatgataaaaatcatcggccccgtttgttgcattgatagaaaggcgtattttattttgcgcccagcgccgccattgtaatatagttgtacggctggttgaagtgcggcaagaaaaagatatcgagcagccttagcttatcgatagtgacgcgctcttcaatcgccaacgagaacatatggatacccatggacatatcgtatttggaagccatctgcgcgccgataatacgccgcgaagccttctcatatacaatgcgcagctttaccttttcgttatcgctcataaagcgcggacgctggtaatcctcgtaatcggtacacagcgcgtctatcccatgcttttttgctttttcaagcgtaaggcccgtcgcaaccatattcataccatacacgcggattccgttagagccctgtacgccgtttgtctcaagctcggccccacaggcgttgtatgccgcaataatgccggagcgcacggcgtttgtcgcaagcgctatataattttggtcctgcgtggaattgtcgtaaacgacagcgcagtccccaattgcgtatacatcggggatgtttgtcatctgccttttatccaccagatatgcgccaattttcgggtaggtcttgattttatcctttccaagcgagctgttcggcgcgaaaccgagcgccagcaccgccatgtcacagtcgtatgagcccttgtcggtgattacacgctctactttattggcgccttcaagctttgtgacggcttggccgaaggcaagagaaataccattttctttgagtgttttttccatcatatcggaaaaatcacggtcgtaatagctcgaaaggcaggtgtccgcgcaatctatgagcacgacctccttgccgttctttttaaacgcctcagcaagctccacgccgatatatcccgcgcccactacggcgaccttcctgatatcctgtgttttcagcttatctattacttcttttgcgtcctggtaaagcttgacctgctgcacgttttcaagctcgcgtcccggaatcggaacgcgcagcgggtgggagccggttgcgatgattagcttgtcgtacggctcgcgcagctccgtaccgtccttttgctttgcgtataccgttttttggccgaaatcgatgctttccacctgtgtttccatataaacgcgggcgcccttgtcggacatgattttttccgaggaataaaaaagcccctctgggccgggtatctgcccgccaatccataacgccatcccacagcctaaaaagctgatattggaatttgcgtcgaacacgacgacctcgttgtccctgaaattatccagaatggtattaacagcggcggtacccgcgtggtttgcgccgattactacaattttgctcatttgttatttcccagccttccactgaataagatgtttttattttatacagaaaccggccgctttatgaattttaaacttgtgcgcttcatacttttatagtatttggcagatactaaagaaaatagtatcaagattaaaatgaggtggaaggctttgaaggatgaaaaccgttttagcaatcttgtaaacggcaagtggattttttcagataaaaatgaggcgataaagctcagctctcccgtagacggctctttgcttgggtatatcccttctatggcaagggcggatatcgacgaagcggcgtctgccgcaaagcgcgcgcaggaggactggaggacggtacccgtatataagaaggcggaatacctgtaccggacggccgacctgctggaagaaaacgaagcggagcttgtcgatacgctcgtcatggaaattgcaaaggataaaaaatcggcggtttcagaaatcaggcgttccgccgatttgcttcgctatacggctgacgtaggcaaaagcctgcagggcgaggcgattttcggtgacagcttccccggagggtcccgcaataaaatgtcttgtgtcatgcgcgttccggttgggacggtgctcgcaatctccccgttcaattatccaatcaatcttgcggtctccaaaattggacccgcgctgatgggcggcaacacagtcctccttaagccggcgacgcagggcgcgctgagcgcgcttaagatggcggcatgcttccaggaggccggacttccggacggcgtgttcaatacggtgacgggccttggcagcaacattggtgattatgtggtcgcgcacccggacattaattttatcaatttcaccggcagtacgcaggtcggcgagcatatttcacagcttactaaaatgcgccccgtcattttggagcttggagggaaagacgcggctatcgtgctggaagacgcggatttggaatttgccgccgacaatattgtggatggcgcgtattcctactctggccagcgctgtacggcggtcaagcgaattcttgtcatagacaaggtagccgacgaactgattgaaaagctgcttacacgcatcagaaagcttaaaacaggcgacccgcgtggcgacgcaaccgttacgccgctcattaacgagaagtcggctgattttgtcgagtcgcttattcataaggcaatcgcgcagggcgcccagcttgtaacaggcgataaacgtgagggcagcctcatttatccgacccttttagaccgcgtcacgaccgatatggaaatcgcgtgggtcgagccgttcggtccggtgctcccgctcattcgcgtttcgtcgatagaagaggcggttgaaatcgccaaccgctcggaatacggcttgcagtcgtccgtctttaccaataacctgaacaccgcctactacattgccggcaagctggaggtagggacggtgcaaatcaacaacaagcccgaacgcgggccggacaatttccccttcctgggtgtaaaaagctcgggtatgggtacgcagggtgtgaaatattcgatagaagccatgacaaggccgaaggccgtcaccatcaacctgaccgagccgtaaaacaaaataaaattatttgtaaaggcgttctgatacagagcgcctttttactatctgcccatgcctaatggaaaaactacccaagaaaaaacgttccatatcgttcaaagatacgtcttcccgccgttttcttgtgcctttcttttcccagcgctataatcaattcgttagcttgtttctataataaggcaacaaaaacattccgtgcatgggaccatacgcgcggcgcgcgtgacgatatacaaagaaaagagaattttacaattgaatgaacctctccgaccgcaatcggcgacgtactgcgtatccagatgaagcctgcgcatattatcgacgaattttaggctgaggagtataataaaaagcctcctgttcaacggaaggcttttattatgcgctcgacaattcagtaagatgtggtaaaataaaaagaacgttttataataaggagtatcgcgctatgattcttttggataaaccgtttctatcggatgaaatgaagcaatatattatagaaacaaaaacgcatgtgctgaggaatgaattctctgcggcacaggggctgccgcccggctgctaccgcagcggcccgcaatgtgcagccgcataccaggcgggcgaacgcatctatacaaattctgaaaacgcgctcgactggctgtaccggaacataaaggacggaagccttctgcgcggaatcacccttatgaaggacaaagccgcgctgcgcagggcgcttttaccgctttatcccgaatttttctttctggaggtgcctgcgtgcaggctcaataagcttgatttttcagcgctgaagctgccgttcgtcctaaagccgtctgttggctttttcagcgagggcgtctacacgattgaaaagaaagaggactgggaacatgcgctctcagacattgagcaaaagtcggtagaatggagcaggcaatatcccggcagcgttgtgggcaacgccgtgttcattctggagcagtatattaccggggaggaatacgcgctcgacgcctattacgacgaaaacggccgtgccgtccttttaaatatcatgaagcatgattttgcctgctcctccgacgtgagcgaccgcctttattacactggcaaagaaataatagaaaaaaacctcgcccggtttacggattttctcaaccaggcaaaccgttttatgcgggtgacaaacttccctgtgcatgttgaaatcagggtgaaagaagataaaatctgtccgattgaatttaaccccatgcgctttgcggggctgtgtaccaccgacatcgcatattttgcatacggcttttatacctacgattattacttgaaaaatatgaagccggactggaatgcgctgctgcgcggaaaggaaggaaagctttacacgctcatactgctcaacaccgttgaaaaaacgaagaatgctcgaagctttgattacggcaggctctgccaaaatttcgaacgggtgctctgcctgcggaaaacggatcaccgggagttcccggcctttggtttcctgtttacggaaacaaggcttgaaaacaggaaagagcttgatgacattatggcgagcgatttgtccgaattcactattttataaaaaaacgcccggaacctgctcccgggcgtaattgatttatggacggaaatgccttccctgctcgacgtccttttcccgaaaggctctttgaatcgtgttccatacacgcttcttgtcgccgctccactcaggcgcaatcaaaagctttttatcaccgtcccctgtcagccggtgtattaccatatccctgggaagcagctcgatgcattcgcataacaaacaggcatattcgtttagggccatcgttttgaacatgcccctttcataatccgctgcaaggtcggtgccgctaagaacgtggagcagctgaagcttgattcccttagcgccgcttcttccggcatacgaaacggtttccagcatctgcgcccgtgtttcacgcggaagtcccaatatgatatggacaacaggctcggcgccggcggaaagcaggttccttaccgcttcatcgtagcagggcaaatcatatccgcggcgtatatagcgcgctgtttcctcatggattgtctgaaggcccagctccacaaaaacgggttttatacggcaaagccgttcaatcaggcgcagcacatcggcgggaaggcagtcaggccttgtcgcaattgaaagggccgcgacctgcggatggtaaacagcgtcggtaaaaatctcctccaaataggaaatatctgcataagtattcgtaaatgactgaaaataagctatatacgactgtgcctgtgttttcgcctggattttttgctttgcccaatcaatttgagccgttacgggcagggcgggggaggccgcaaattctcccgagcctccggcgctgcagaatatacagccgcgttccccttttgtcccgtcacggttcggacatgtgacgtttgcgcttaacgcaagcttatacaccttgcagccgaagcggtttttcaaatatttgtccagtgagcaataatacaattcaggcaggccccttccactgcttttgttatttggtttacaaagctgtaacgtcagcagaaattgacattatatgcacgatgtggtaaactaatacgaaaaagagcataggaattttcgcttttcaatcgtgatatatttttgatttcattcgaattttacaggatttaatgtttaaaatcaaggagagcaatataaaatgaaaatcattcctttttctccgcccgatataaccgatttggagattgacgaggtcgtcgatacactgaaatccggatggattaccactggaaaacgcaccaagctttttgagaagcaaatcgcggattatatcggcacttcaagagccgtatccttcagctcctgtacagcggcgcttgaactcaccctgcgtcttctgggcattggggaaggggacgaggtaatcaccacggcgtatacctatacggctacggcttcggttatccaccatgtgggcgcaaaaatcgttttggtcgatacagcgcccggttctttcctgattgacccgcaaaaggtcgccgccgcgattaccgagcgcacaaaggctgtgattccggtcaacgttgcggggaaaatgtgcgattttgacgccgtttttgaagcggttgaaagcaaaaagcatctattcaggccgcagggcgatttacagaaggcctttgggcgtgtcattgtaattgccgattccgcgcacggcttcggcgcaaggtcaaaagggctcaacagcggccaggcggccgattttaccgccttttcttttcatgcggtaaaaaacctgacaacgggtgagggcggagctgtaacctggagggacagggaagggttagataacgacgagcttgcccgccttttcacgattttttccctgcatgggcagtcgaaagacgcgctttccaaaacacagctcggttcctgggaatatgatatactctatcccgcctataaatgtaatatgaccgatatacaggctgccatcggcctgaagcaattagagaggtaccatgagcttctgcaaatcaggagaagcgctatcgagcggtatgacgcggcctttttgcctttggggttaaagccgcttatgcacttcggaaaggattttgcttcgagcggccatctttacctgctgcgaattccggggtatgatgaagaaaagcgcaatgcgctaatcatgaacatggcagaaaaaggtattgcaacgaatgtccattacaagccgcttcccatgcttacagcatataaaaacctcggcttttgcatagaggattatccaaacgctttcgcgcagtaccaaactgagatttctcttccgctgcacacaaagcttacaaatgaagatattgattatattattgaatgtttaataagggcaatcaaataatttcgtccagggcaataaatttattttattgcccctgtttttatccgcggtttttgtcagctgtggattttcagaggtgaaattcattgcgcattctttttatctccagctttttttctgaaacaggcgaacattcctttatgtgcgccgatttagtggacgccctttcgcggcgcggacaccatattgcagtagtttccacggaaaatggccatatggacggcctttatgcgattgaacagaaaaacagctgcgctgtctgccgtgtcaaatccgggaaaatagatgagggcgggctgccgctgcgcgcctttgccaatatacgcctgaataataaggttgcaaaagcggtgaaagaggcgtttccaaaagagcggtttgatttgatttattatgaagcgccgcccgtgacggtttcaaatgcgctgcttcaattgaaagaatactacggggcgcgcctttttgtgtttgtgcgcgagtttttcccgcaaagcgcccgcgatatcggactgctgccggaaaaatcgtttgcttaccggcattttttgaaagagcagaagaagctctttaccgcggcggacacgctcggccttgcctctcaaggcgcaaggcgctttctgtccgtcacgtatccatttatagaccgcgctaatatggaggtttttccctttacaaaggctataaaggcagccataagcaaggagcaatccctgcgtgcaaagtacggtattccaaaagacgcggccgttttcttttttgcgggcgccgccggaaagcgccaagacgcaaaatttatttgcgatgcgcttgaaaagctttcaggactggatgcggcctattttgttttttccgggcttggaagcaaggcaaaatatatttccgcccgtttgcaatgctgtaaaaatgttatcgttgcggacaaaatgtcacgcgccgaaattgagcagtttactgctgaaagcgacgtgggcgtaattacgcttgattaccggttccatacgccgtacggacaggaaattgccgttacgtatatggaaaaccagctgcctgtccttgcggcgaccgaccccgctactgatttccgcaattttttgcaggaaaacaactgtgggctatggtgcgcgtcaaacgatattttttctttctgtaataatataaaagaattgtcacgtaatgaacagctgcgtaaggatttgggaagaaacgcttccaagtacgcgcgggaacagctggacatatctgtttccgtcaggctgattgaagagaattcaaataatcaataatgatggccgcgcacagggtaggccggcaattgccggttgtgcaaggctccgggtatgccctgcatacgccgattgggggattagaaatgttgctaaaacgggcgacagcattatttttggtgtttctttttgcatgctccggccttttttccgacctggcatttgccgccggggaagataccgaaacgattcgtgtcggctggcccattcagaagggaatcagcgaaatcgacgagaacgggaattataccggctataattacgaatatttagaagaaattgcgcaatataccggctggaactatgagtttgttcagctggacggcgatattaacgatgttttatcccaaatgcttgagatgctcaaaaccggagagcttgatttaatgggcaacattgggtacagcgacgagcttgcgaaggtctatgattttgccggacagagctatgggactgcatatacggtgctcagcgtgctctatgagaatacgtcgctgagccaggataattaccaggatatgcagggcatccgggtcgctattatcaagggggcaaagacgagaaaagcggagcttgaccaattctgctctgtcaatcaaatcgaatatattcccgtctactgtgagacggcggaggaaatgctcaatttgctcaaaagcggaaaagcggacgcgatgctgcatgttgacctggactattatgacgggctgcgcccaatagcgaaattttcaccaagaccctattatttcgcaaccacgaaggggaacggggcaattgtcaggcagctcgattccgcaattctcagtatcaaccaggcggacccttatttttccactggcctatatgaaacattttttaacacacaacagaaaaaaatacttctttccgaccgggacaaaaaatatatcgagaacgcgggtaagcttcgggttggaatacttacggacagcgcgccgttccaatacgctgataaaaagaccggtgagctcaaagggattgcaccggatttattgtcgtatatatcggaaaaaacagggctgcggttccagcttatccatgtttcttccccggaggagctccaaaagcttacacaggcgggtaccattgacgtcgtggctacgatggaatatgactacaagcttgcgaggcagatgaatgtttccttaagcaaatcctacgcttcggcccaatacgtcatgctgcagaaggaaagcgctgaaaagccgagcggcagaaggcttgccatgcgtaaggattataattatgatggcgaatatttgggtgaggtaattcgttttgacaatacggagcagtgcttcgatgccgtcaacaacggcgatgccgactatacatacgccaacagctatacggtccagtactacctcaacgacccaaaatacagcaatctcaagctcattccgcagacctattccccttatgaggcctgtattggtatcgtacggccaaataataaaagcctgcttaatattatgaataaaatccttttgggaattccagaggaggatttacaggcgattatttaccagaatacgacctaccgtcaggaattcaccctgatgagcctgattgaggcgtatccagtggaatctatgtttatcgttgtgattctagccggccttattatcggctgcctgctgttgattttaagatcgaggacgaggctcaaccggaaaattgcgatggatatcaaaaagcattatcagctttatgagctttccaatgaacatttttttgaatatgacctgaataacgacagcctgtttctgtctctgcgcaaagacgatgccgctgggaacagggaacccaataccacgatacccaagtatggaaaatccatgcgtaatgagaacaagctttcagaagagcagaaaaagaaatttctcgatattatcacaaccggcaaaaacgggattgaggatatgcgcctgcatatgcccgacgatacttaccgctggatgcgtattacatacaggcagataacagacgatacaggaaagctcgtgtatgtcattggaaagctgaccgatatcgacgaggaatataaagagaagaacagccttatcgaaatggcgcagaaggacggacttacaaacgtatataaccgcgcaacctgcaagaaaatgattacgcaggaattaagtaaacttcagcccgggcaggaagcggcgctgctgattctggatatcgataattttaaatcagtcaatgatgaattcggccattatgggggagatattgttttaaaagaagccgcaaagcttctgccggacgtattcggcaagataaatattgtagggcggttaggcggagacgaatttaccgtttatgtaaaagacgcgggggacaggactttgctggagcaggactgcgacctgctctgcgcgcaaatgcgccaaatcaggctgcctgggagttcaaagagcttcactgtgagcgttggcgtcgcgattgcggctgcgggcgccacttataatgagctttataagaacgcagacaaagcgctttataaagcaaaagaaaacgggcgcgacggctactgcattacacagggcggataaacggggtatcaatatgaagaaaagcagcggcaaaaagcgtaatatgaaaaataagcttttggttttaggcggcgttatggtaattgcaatcgggacgatttacctcctcagcgtttatgtgcagaaccttaataacgcttatcttgataaaacaaacaattttataaaagaagaattaagccatatttctatgacaatcaatgagcggactgacaatattatgcagaagctcagggtgctttcttatacctgttctattatggacgggcgcgataatatcctcgaataccttcatactgtctgcagcagggatgaatttgtacgcatggcgtatgccgggctttccggcgcgggaattacgacagacggccagtcagtcgatttttcagacaaggcatattttaaaagggcggcaaaaggggaaaacagcgtctattacgaacgggaatcgcctatcggcatggaggatgggttcgtttactccgtgcctgtagtaattgacggtaaaatctccgccgtgctcattgcgcacaacagcaccgataaggtcaggcgtattatgaacagtgagaagcttgatgacggcggttctatacagataatcgacacaagcggacaaatcgttataaacggcaatacaaatgatgaaaacgcccaatcaggcaatatttttgccatactgcagaaaagcggagaggccagcggcggtttttctttgaataccatgaaagaggatatctcctccggcagttcaggcctgctttattacaacgggaaacaggggacgcataacgtcatctcttacgtcccgctcaacgtaaaggactggtatctgattaccataatgcgtgccgacgttacgccggacagcactggcatatatgtgaacgtcacaatattggtaacagttctgattacaatcgtatttttggggttgttcctgtttatcatctggaacaaccggcgaaatcaaaaggagctggagcatatcgcatacgtcgacccggtaacgcaggggatgagctgggcaaagttccaggctgtagcgcagcgcgatattcaatcggcctcgccgaaaacttatattttgatttcactcgatatttataaattcaagctgattaacgaatccttcggcagcgctgaaggaaacaagacgctgaaatatgtaaatgatgtcattaaaaaacacctgttggacggggagtatatctgccgcgtttcaagcgatgtattcaacctgctgatttataacataccggagcctgaaatcaaaaaacatctgtctgaaatcgtcaccgagctcaattcttataatgaacattccatatacaaatactatcttcaaatcacctccggtatctatgtaatcgacgacccgtcgcttgacctgattaccatgcaggaccgcgcgaatatggcgcgcaaggtcgcaaagaggtcggtttcctacgaaccgtcaaattattgtttttataaggacacggagcgtaaacggctgagcagggaacgtgatatggacaaccggatgatgaccgcgctggaaaaacgtgaatttgaggtttatcttcagccgaaaattgacctgcgttccaaccggattgccggtgcggaagcgcttgtccgttggaacgacccgcagcgcgggcttataccgcccaatctttttatcccgttttttgaaaggaacggatttatcactaagattgatttatttgtttttgaagaagtctgcaggcttcagcgcaagtggagcgacgaagggaaaacgccgattcctatttccacaaacctctctcaaattcatctgaaaaatccggaatttataacagaatttgaaaagatttataagaaatacaacatccccgcttcacttttggaaatggaaattacggaatctgtcgtatttgaaaacctggaatttttaatccatattatcgagcaaatccacgcaatcggtttttgctgttccctcgatgattttggaagcggatactcttcactgaatatactgaaggatatccgcgtcgataccataaaaatcgataaggccttccttgacagcaaggcacaaaacgtggacaggacgaagtcgattatcaaaagcgttatagagctagctaaaagcctgcatatgcggacggtaacggaaggcgtggaaatggaagaacaggccgtgttccttaaaagcatcggctgcgacatggcacagggcttcctgttttcaaggccgctgcctatccgtgaatttgagggttttctgaaaaaacagcggtcctgatacaaaaaccgcttacaaagcgaaagaaacggagaagataatgcgcgtttttattgatgcggacggttgtcccgtcgtggacgagacgattcggctttcccacgggcaagaaaaagaatgtattattttgtgcgatacctcccaccgcattgaaagacagggcgtccaaacggttatctgcccgaaggggcccgacagcgtggattttacgcttgtcaatcttttgaacaccggagaccttgttattacacaggactacggccttgccgcaatgtgcctgtcgcgcggagcccgtgcgctcgaccagaacggtatggaatatacgccggaaaacatcgattccctccttttgtcgcgccatatgggtcaaaagctgcgccgtatggggaaaaggacgaaaggcccgaaaaaacggacgcaggaacaaaacgccgcgttttcaaaaaaattaaagcagctgctggaaagagaggaatgagcttatgctttttgtttgttatcccaaatgcacgacatgccagagggcgcagaaatatctggattcccacggcgtcccctttacggtgcgcgatattaaaacggacaatccgtccgaagaggagcttcgcaggtggtatgaaaagagcggactgccgctcaagcgtttttttaatacgagcggcctgctgtataaatcgctttccctcaaggataagctgcccggcatgacggaggaagagcagctgaagcttcttgcaaccgacggtatgctcgtaaagaggccgattctgattgcggatgcttttgtccttgtcgggttcaaggaaaaggaatgggaagccgccctatcggaatgatttattttattctgaaaaagctttatattttcttcaaaaggggaaacaatccgttgttttcccttttgtataccctttcactgccttccaaatccacgcatggaatttccgcgcgtgttgcattccacttttttaactcccaccgatatcaatgagggggctcctcagcgtcgtcacagcattaccgaaggaatctaaaattgcttctttggttcgcttagtgggcctttgccaaaaatgagggcttttcgcttttatgaaaaaagcctcatggagcagaagctgctgtctccatgaggctttggttattttgataaacatttccggcgggaatcctcgtttcgccgttttgcagcggcgcggtggataaaataaatataggtaagccccaggttcgtttccagcagggagttgacgataagcggcgcaaagccgcgcgcgtatcctggtgacaagaaggaaaaattcccaagcgaactgtaccggaataccggttgtaagaatccatgaaatattgattttatccttttttttcatgcgcaggttacagatacaaagaatcgcgtgaccgaagcgcatgctcaaccacggcagaaaccaaaaagaggtgtcctccaacaccatgtgtgtgccgggcgtcgccccttttatacagaatagcagttaacatttgaatttacaatcaggaggcatccggttaaccggagcctcctgaaaaagaatctagcctttatttttttacgacaggtatccaaatttcgctgcgtgtatcgggcctggagccgtcttcgtcataataaacctcaatgtccggcgcgttgccgtactggtagccggagctcggcagccattctgtagtaatacgcttctgcatatcctgaatggcattcggcatcgggccgatgcattcgaaaactgcccatgtagcggcagggacggtaaaggtttccatagaaccttccggctctttatcggttgcaaccgcaatatagtagtcaaacttactgttttcagtaataggctcgttgcagacactgatacccaatattccgcgcggcatctggttgagcatgggtattagcctcgccaggctgccgtttttgccagtggtttcccaaaattttggaatatccctgtagcaaaccccgtcctcaattgtggtggacagctttaccccaacaacacgaaacgcttctttttcttcaattctgtaattcataataaccgctccttttattgatacttgaaaagcgattggcggatacgctttgagcgccgcgcctttttttcgcgcggcattcggtgcgataccgtgcaggctctgaaacgctcttgtaaatgcggtgggggaatcgtaaccgtatttcagggcaatatcgataaccttgtcacctgtgttctgtaaatcgaaagcagcgcacgataaacgccttttgcgaatatattccgacagcggtacctctgccatataggaaaatatcctctggaaatgataaacagagcagcaggctttttgagcggctaccgataaatcgatttcaccatccaggttttcttccagatacgcaagcgcatcattcatttgtttcagccaatccatagcaatcacctttctgtctataagcttatcaggttaaagaacgggatgcctctcttttcctgcacgattctgcaagcatttttaattgactatctcctgaacgcgcccaacctgtccgtctagcagcattactttgattccatgcggatgataagcgctgttggtcaggattttcgccacggttccttcggttagccttcccgtacgttgatccgctttcagcacgatttttacctgtgctccaattttaatatccgctctgttctgattattcatttcgtttccacccttgcctgtgatgtatgttttgtttgtatttatatagtataacataaaaacggcacagttccatcataaaaccagcctgtcaggcaaacaggataaaacctgaacaaaaaacgcaatagcaagaggcgctgccgtagccctgcccggataaacgtaatctttctatttatgggcttttgtaatatgcgccgcgctgtgagcaacactattaaaaacaaacagtaaaaaggagctaagatgaatcacttacaatctgaaaaatccccttacctgctccagcatgtggagaaccccgtcgattggtatccatgggggacagcggcgttcgagaaagctgtttcggaggataagccggttttcttaagcatagggtactcaacctgccactggtgccatgtaatggcgcatgaatcctttgaggatacgcaggtagcgtcgctgctcaaccgggactttgtgccaatcaaggtagaccgggaggagcgtccagacgtcgacgcggtatatatgtctgtttgccaggccctgacaggctcgggcggatggccgctcaccgttattatgacgcctgggcaaaagcctttttttgcgggtacctattttccaaaataccgccgctacgcccagcccgggctgctggatatactgaatcaaatatcgcgcctttggaaagagggccgggaacagcttcttcaggctggggaacaaatttcggcggcccttacacaggaaagcccctctacagggaagaagccggataaaaacctgcttcacaagggatatcagctcttccgacgccaatttgatggaaaatggggcgggtttggcacagtgccaaagtttcccacgccccacaacctattgtttttgatgcggtacgccgcactggaagaggaaccctttgctcttgctatggcggaggcaacgctggaatccatggcccgcggcggtatacacgaccagttcggcggcggattctcccgttattccaccgatgaaaggtggttggccccgcactttgaaaaaatgctctacgacaacgccctgctgctcatggcttatgtaagcgcttatcaaattaccggtaaggaaacctatgcggacacggcataccgtacggctaactatattctccgtgagttgtctcataaatccggcggctttttctgcgggcaggacgcggacagcgacggtgaggagggaaagtattacctcttcacgccggaagaagtgtgcgcggtgctgggggaggaggaaggccgggaaatctgccggctatataagattacagaagagggaaactttgaaggcaggagtattccaaacagaatcgggcaggaggagcccgcccttcctatggacgacgaacggctgaaaaagctctgtgcgtaccggcttggccgcgccgcactccataaggatgataaaatcctgctttcatggaatgcctggaccatccttgccctggctcgggcagggcgcgtcttaggagacgaacggtactgcaaagctgcggccgcggcggtacagtttatcgaaaacaatatgacagacagacaaaaccgcctctttttacgctggcgggacggagaggcggcgaacactggccaactggaggactatgccgtatacgcccttgccttgactgagctgtaccgccttacctttgaaccggcctatctgcaaaacgcccttgagagggcacggcagatggttgagctttttgaggataaagaacatggcggatattttatcaccgcgtatgacgcggaacagttaatcgcacgcccaaaggaaacctatgacggcgccatcccctccggcaattcggttgccgcggcagtgctgcagcgccttgcaggcttgaccggcgagcctttctggcaggaagcggctgatcggcaattctgtttcctaactggagaaattgagcattacccgatgggctacagctttgcgcttaatgcgctggccagcgcgctttatccccatcgtgagctaatctgtacggtgaaaaggggcgtgccgggtgagctgggcgaatttttgaaaagccatccttcggagaacttgagtattttagtaaaaacgaaagaaaacgccgaagagcttgccgtatgcgcccctttcacaagcgaatatcccgttcccgaacgaggcgtggcgtggtatttgtgtgaaaacgggtcgtgtaaggcgccggtaaacgactttaacaaactaatgctttaaaaaaaagaatgatatatactttaacgtcccggtttcttatggaaacccgggacgttatctttaaaaattttctgaagccactgcaattaagagcgatatgtgttcgctctccaatgaaaagtataaaagcacgctgtgaatgacctggctgcttttggaacaggatattccgcaaaaatccgtcgctcaaagctttctatttctgaatcctcattgctcatgttctccgccgttcatttaacctctccaaaagccgaacatcaaggtttcacgctttcgagccgccattggttctcttttttaccagatagcgcagccacacactgcctccatcctttacctctgcgctttgaagcgcaaatcccaccggatggtccgccgccatgccgcctttagcagagaagagctgatgatgccgtcgtatgtgaccagccacttcggggacttgctgaaaaagctgggactgcggaagattcgtttccacgacctgcgccacccttatgtcaagcccacgacaaaaaaatataaatctacaaaaatagaaatcccaaactatcaaaaatgtcaattgatagttcaggatttctgctttcccctttcgctgtccgacaatagagaaaagtatagtttaatgctcaactcgttgcttattactctacctttatacttccaacagtatctgatggccgtttgcctctcatgagatagcagtaagcgcgatctgctgagattgctatgtactttgatgtgcaatgcgaaagcaattcttcttctacaatcaatcgatattgccagttttccatattatcaggtttcgtaaatcccgcaagaatgctgtcatagtcagtttgggttagtttgagaattagcttcttcaaatatgcattgtaatcatcgagaccaataaagtattcaacctccctaaaagcagggaaaagctttctcttttccgcagaggcagcattccaatacgaccaccagtagttgtaatactgatattttccagaaacctcaactgtgagcatggctcgtctaaatttgtcaaactctgtgttacaaggctcaagttcattattaaaatacatagcaaaaaccacttggattttcttaagcatctcaaaattaatctcgtcaatttccgtttggtatccagcacattgaagtgcaaacgttattctgccgcgcaaaagttcattatcctcagttctaaataacaatcccttgtgttccgggtacttttgaataattcttgcttttaaggtttcttcctttacctgttcgcgtgcaaaggtggaaaatatagaggcagaacacaaatatgcatatatatcattgcatccgttggccagctcattgaccagcccgattgcgccattgaaagtttccggacttcgtataatgtcactcctttttccgtccggcgtaaggtctgcgcgggacacaatatttcttactacgcgcatccactcctcaaacttgttctgacagatatcctggctgttcattaaatatcttgtttgtgcataaaaaagcactttatgggagtaagaggtactgttaccaagcagaatttgattgagcagatcaccttcaggctcatggcgccataaaacaaggttcaaagatggaatattctgactttccgtcaaacaggcgtagagtgcatatgtctcgcatatatagtcaaatgtctcctgatcgatataattgatcagttctcttgcagcgttggtataatttagttttctaattatatcaatacgttctgcgccctttactaactgcccaactggcagctttgtcattatgagcgtgttgataaaattcatgtgggcgttatcaacggaatgattctttttataattctgccaaagaaaatctgtccatacaccatcaattttgtgggaaaacttttcattttctacttttgatgcttcccagttttccttaattgctttatcctgtatctcagctttgagattctcgaaaggagtcagtaatctccctcgtgcattcatttttatgtagagatcatccgataggccaaagttctccaagatcaaaaggtaaaatacaatattcctgtgattcacaagtgcagtccagagattatcgacttctttaaatgccgtgtgaatcaaatcgatggaacgtaacatggcccgtatgctaggatcttgtttccatgaaagataaaaccacttcgcgtcgagaatttgttcgctaatcgaatgcattgaagagtccacagttatacagttgtccaataaagcttcgcagaaacgacgggcagaaagtcgggtttcataggaaaactttttgagagtgttgcgacatccatcgtctaaatgtactttttcaaatgcataccaatgtagcagaaacagtgtagtcaaacgctgttgcccatctagggggagaaacgtaccatcatcaacattcccataaatgaagtccaggtttatggttttgttctgcaagatgctttcctttagcgcattcaagaagttttcacagatagatatattttcttctcggccctgtgcataatctctctgaagaatcgggatcttgactttatatcgctcgaccagctcataaaatgtatagatgtctttttccattttactttgtcacctccatataaggactcaaaacacgaatcagatcctgctcgtatttctcgcgatcgtcctgtgtccaaaaagaaattttaggaggataatcactgaaatattttaaaaatgtatttttggtacaaataggaacaaatcccccagttttgtcaagttcgatgatatatttccgtttcagtgggaacacagcatttttataaccacgatttgtcttttcgtccaataaggtaaggtttgaaatctcatccatatcttcagcggcattcatgtatctgttaaaatgcgcggtaaccttatcataaagtaaggtgaagtcatcgtcctgctgaaaagaacaagtagcaagcatggcatcaacttcctgtattaaaacagaaccatcctcttgttcctgatcaatgtagcttttaacgtccagaagccagctgtccctgtttacaacgggtacagtccgggcatccttacgagaagcgatatgttcaatatcccatttattgagcttgtagtcatcaaatggaaaataggaggcatcgtgctcattttgaagcatagtcagaatgttgtacaacagcaatgcacttctggtctccttgctttcataattcaaatcgagtaaagcacagtttttataatgccttttaatcaaagagtcaatgtagtcaacaaattcgctctttttcagattggaagactgaatgtacaaatgcttgatattcgcgatctctgtcgtcaaaagaaatccgattttgtgataaagctctcgattgtgaaaccactcgttgaatcgctgatagtatccctgtatttcctcccaattctttttcatatccttttcgcttttgcccgctagctttgcattgaaaaagcgaaaagtggaatatggggccttgtcatcagagttgttcatcaagtcaaatatgaattcaatacggttgtcgcatatctgccagtcacagagaaaataccatattttgtcgttttgaaaagcggtttcaatttggtcccattcattggcgatttcaatttgacggcgtcgcattccgtctgcgttggtcacccgaaagttggagctgttaagaaaaagtgccttgatcaactccgcatttgtcaggctaattttaccgatgttgagccgcgtaaaaacagtgattggattttcctctattgtctcataccagatcacttttgtgtggaacttgattttggagcggaattcatttttgtcgaaagtgttctgctgctcacatgcctcaaaccatgcttcaatagtggaataagcttgatgcatataataaaagtcaatatagttatttgcatcctcttccggatgttgaaggaaaactttggaaccgggtcgagtttcataatcaagctgaaagagcttgtccctctttttttcgacaaaatcctggttgagataatagagaatcagataagcagtcgtaagtcgttgctgcccatcaattacttcatagatgccatcttccttttgcttcacaacgactggctgcaaacaataccaggttttttcatcgcttccatcaatctctttcggtataaattcgttaatatcatttaagaggtcttttacttcctgttttgtccaacgatatccacgttgataggcaggaatgtagaaagaatattgagatagttcgcttaaagttttcagttcaacactattcattctgatctcctttgtatttcatccaataatcaaaattacgtcatggtagaaagcaaaaaaacataataaaaaaataacttcatttattttcccaccgccattatcttctaacattttttattataccaaaattttcttcaaaagtcctgccattttcaataattacatcaaaaaaaagttaatgcctcattcatcaaattagtcagagggataggaacccctttcatttttagattgttcttgtttgttactccgtcaacactatcccaattttcattaatagaaataaatctgacaccctttactggaaagtatttttcaagatagaatccgacatcaatatgttccctaccaaaccgagacaagtctttcacaattacacaattaatcttttcatcagcgatatcctgaagcatacgctgaaattcatggcggttaaaagtcgtgccgctggcatttatgtcaatataataatcctctagttgaatatcgtcttgtagtaaaacaaaatcctcaatgatccttaactgattctcaatagaatctgatggaatattttcttttaccacggaaagccgcatataggctgccaccctatacatcctagattttagttcaatctctgcaacactattctttctgcttttcctggccattgtatagccctccttaaaatattaaggactatggtactttttatcataccacagtccttaagttttcgcattattctgtttattcttaatcaattcgactttttcatctatcgtataaaggaccatttaatcgtgttttgtcgaaattctgcttccacgaccttaggcattcggcggcgaccaatatgcaccagctgaccggggatttttataccgtgggcatgattggggcacagtctgaaaggtacagggattcagcttggaatttcaaccaatattagaggctatgaccgcgcagtatgtggatgtccgtctggagcggaagaagtttgtgctggatgcctaccacaacgcgctgttcccgaaagcaaatgacgaggaaaataaggagaaccggtagagagcggaatgaatatttccggagggctttgctacgttacaagcggtattaacacttcttacaccaatttatcaccagagaatcccgccagaatgcatcgaatgaatagagaacagaaaaacgtggtgacattgtcaccacgtttttgtaaccatttcagtgtaagcttgaaaaccgaagcatgaatgacaatgagaaaagccgcgcaaacactgggtttgtgcggctttttggcggagacggtgggattctacccgcgggctaaaaaacatgccactggcatgtttttcccggcctgcggaccgtcgtcctgttctcatctccacctttcgactgcaaaacaaagaacaccaacctccggctggtgttctttgttttggcggaagcggtgggattcgaacccacgagtccgtgagggctacctgatttcgaggaagaagaacgccgaaaaacgccggtgtttcgcggcttttttgcttattgcgccgggtaactaatgccgattcagcaggaaatccgtatggaagcgttttagagattaaactcttttacagagagaattttagtgacctggcaccattttatcaccatgtcaccaaagacgaaggcccattctgtcaagaaacagtttgggccttttttgctttttgccacttctgaaatgaaaatgtttggagattgcatctgccggaaggtcttatggctgaatcttcaggttagctttatgaactctatccattgtatcacagcattgctgggtcgcttcccgagagccgccttccatcccgatcaagtatcggatggcagcatccatatccatggcttcaatcgcttcggacaactggtcgagttcagctatccgcttatcttgatgttgttttcttgcagaacagaaatctatgatgttattttccattggcccaccttccttggattactttatctaaattataagccctagatcaagtaagcacaaggaaaagactcgcacacagactgttttgggggttatacttacttgggacaattaacattttttcacaatagaattcattcagtttatgtagctttccagtattccttggcattttgattccagctcgtacaaagcttgttctgcggtgattatttgttgttcaagcttaaaaacttcatcaaccacttttttctgcgattttgggtcaggcagatctattcttagtttcttaattctgtctattgaggcccgtaaacttcgagtaaagccccgagaggttcccgctttattcagggcccatgccagatagcggggatgaattttttcctcattcttaacgcgtaggactccacaatgatcggttggataaaatggttcattttctggtatataatttacctgccaatcaccgtcgataccccataacacagatggaacatgaaactcagtaatgagcaatttatcgatgtacccaaatggtctgaacacattagcgctatatacaggaactttaccatttgagataaactcagtttcaacaactcgtttaccgatagacacttcaaatagtgttgaatcatccaaccgtactccaccaacagtaattatttctatattattaaagagcttctcaattttacttttgtattcttcaatactcatgcgaatacggctatactcttcatccacagcttcgcaggcagcaacaatttcgcgttgcacttcatgtggaggataaggaatagaaatcgttttaaaaagttcagatgtgaatgctttgaatttgctacctgtagcttgttcctgcaactgttgcacgatactttttagtgcataaaacaaatatccgctttcaatattatcattgggatgaagaccgtagcatgattggttaaaagccatcggaatagtcaactgtgccattgctcccacagtgccacgcgcagatatgataatatccataggttgcagtatgttagtgctactgttttcgtatccagcctgggtaatgctcttttctgcgctggaaacatagcggtttgtattactgaaatcggctacactcaaccatggaatatctccgttccagaaatcaggacgcgatgtacttggcgttcctccattaataaccgagcaaaattttagcaacttttcgagccgatatttactttttattacagaagttcgagccgctgttagcgaaattgtcttttttaggtcggttccgtttaaatcgaccatatctataaggcgtaagcgcgaaacaaactcggattcccctactgcaactccattgaaattggcacggatgatggaattgattttgctcgtgtctgtcaaatcaattggattaaatagcggtgtgttaatgccgttgatgccctttcgcccagtaattggcgcaccgttttcgtcaacttgcgctacacctatatattttatgccttcattgccctttgcactactccactcgtagccgagatactttttaatctctgtgccagccggcgatttgaccacgaccacatcctgtggattagtgtaagctaggataaagtaatacagtttctcctgttcaatactacgcacatactcaataaaccgcctattcaactcagccagcttataagcttcagacaattttttgaaaaactgctttgttttcaaattccttatttcgcttgttttatcgaacacagtacgatacgccttgaaagtgtctgtattcaacaatgcctgatttggattgttttggagaaaggttttataatcatataattcgtaaccgaagtataaacaataggcttcaagtaaatcaaaatcaccaaaaacatcatctttcataaaatcaccattgaaccatgctgaaacacgatttttatagtgttctgaaatagaagggttttctgctttgcgacgtaggaaaagcgtaaccgtgtttgtgccggtcttcccaaatgtaccgctgccaaattccgctattgccactatatcgaagtattgtaaaataatctcacgtgcttttgtataaactgccccgccatttgaaagtatagaagatggcaaaattatcgccgccacaccaccgggagcaagcaattgttttgctcgttcaacaaaaaacgcctcaatagaattattggaatgaatgctttttttgtcgattaaatcagtggtatcaaatgacgctcgctcctcatcagagagcatttcaaggaagcccttaacgctgtatggaggattggagataagcacattgtatttaccattttttattccgtcattttgtgctagagcatcagcataaacaattctaatttcgtcctgtccatacataaacgctgaaaccttggcaacttttgaaagccgatactctttttcaatgccgacaatctgctcgtaatatgaagatagctgttcttctttcagaaaagatcgaatttgcgtcgcatattcgttaaggaaatgtccagcaccgcaagcatagtccatcacagcgagaggttccggagaactttcaatcatttgctggagcggcaacgaagatacaaggaatttaacaattggcattggcgtgaaaaattgaccttcactctgctttataccttggtctaagaaaccctcaaacaaatcaccaaggaattgattctgctcctctgtttttagtcgaatatcctgtatcatttttacgatttcaagcaagatagcagagttctgcataaacagatgctcattgtgaacatcaagaaacgtaaaatcattgtttgtataaaacttaagttgtctaaaatatttgattatcgtatcgcgtgttgcatcaggatcatttttgaataggttaaaagaatttttgatgtcgctatcatcaatgtaggtaacctcttcattaagaaacttttgcattccatcacggtaaagccgtaaaatacggtctaacagactaaaatagtcatcaaaagctacgcctttccaataaaagcgcagtccttccggattttgcatttcatcgacaattttggctagaaaaaggttaaccaacttgtcaaaagcattttcacgtccagatacattgtgctggcgcagaatagtggcaaactggtgatatttcttctgaatatcctcgtgagtaacttccagtaagtctgctgctgtatgagcttttttacctatttcgtatgcactaacgccctcttcaaagattccctgtaattcaaattcatgatgatatgttgtaaaccacgctttataaagtgattggacatctgtagccttggcaaaagaaagtggttctttcaaggatttcaagtattcgtcattgtcgcgaagggctatgatgtgattggtatatacagcgtgtccatcctcaaattcggaagaatataaacatataaactgagtacttcttatctgttgggcatagctaaacaactgtccaccataaagaagcatattgttccattctttattaaattcttctccccatgttttacattcaataattaaataagcgttatcatcattatccttgacgagaatatcagcacggcctccgcttgcaccgcgacccaactgccatttcggctcaagttcaatgtgagcagggttatagcctttggaaagcagatgatgtatacattcaaaaacgacaaaattttcgtttgctttcatgttgcaagtctgtctctcgtttatcttcataccatcactttcgggatagataagcgtttcagtattaaaatcaacgcgcaattcaaaggcacctatttgtttaatataaatacctttgccttttccagataaagacgtaaattcaagcgcagacaggaggtttttgaagttatctttggttatcataaatggtcttctcccaatagttatactctgatgcattcaagtgcatctaatactttttctgatactttctgttgggcagcatagtccttaatccgtagcatggcaaggcagctcggattagccttgttgttctcccaacgatttagcgttgcaaaacttacacttaagtcacgtgcaagtgtttcctgtgatatattaaggttttgtcgaattgctttcaaaatcttcttccacatactccaaaatatcggaaagcccacaatccagcgccttgcagatgcgctccaatacaccgtagtcgatttttcggactcggtcatggtacatggcgttgatggtcgtcttggatacccctgtcatgcgggacagttccgccattttaatgcgtttttcacccagcaaagtggataatctacaatgaatagccaaatttcgcacctccatttttcttagtataacattttataagtccttttggcaagtcaaatgataaaaaaggctttacaggtgatacaaacgcccttgactgagttatctgtatatggtattatagtcttgctaagaagtttaatataccacttatagaaaccaaaaggaggagtatatgtattccgtttttccatatttggacaacttataccttggaaacctgaacccgaatgagaacctgaatccatcagatccgaaattttgtgagcttcaaaaacaggcgtgtgaactggaagatcaaatcgaaagcaagctatactatttagataaggatctgtttcacgctatgttacatacacgcggtagcgcatctgcgatggaggttcgggaggcttttgccgtgggttaccaaatcgccacaaacttattgctggaggcgcttggattttgcaagcatgatgaggagggcggtgaaacaaattgaaactggaagcgttgctgaaagaacatattacagatatgtccacctcgtttacggagcatttatacgctgcgttttcagaagcccaattcgatctttgtatgcgtaataaggagcgtaatgcagaatatcagcgcaaggaaaaacagtacatccaggtctttgatgaaatccggaaccggcttggtaaaaaccgcaagctaatgctcaagctggaacgcctgcaaaatgaaataaactccatggactgcgactttatctattttcagggttttatcgattgcgttacgctgctcaaattgattcggttgatatagcagcgtgggaggtaaatatggaaatgaaagtgaaaagaatcaccagcctgtttttcttgttttgcgggttactgctcttaccggcatgtactatcaaagaaacatcaagctccgtctctgaagagttatccagagtgcaatcactagataacaggccagtcgaaacaccagcaagtacacctactgaaccaacatcaggactttccgccgctgtggatacagtgataagtgtacctggggagtcattaaatacctcccatatcacagaaagctccttaaaagtatcagaaaatgaaataagttcctcttctgaaaaagcggttccttctccctcagaaaaagagcctcaaccggaaacgcccgctcccgagtttcctgatacacctccgccggtatcttctgacgccccgagcgttgaggcgatggaaagcgcataccttaatgatttattgtcgggagtcaactcacatagaagcaatccactgaatatggatgctgatttatcggcggcggcacaggcgcacgcgaaggaaatggcacagacgaaacgcttgtaccattcctgctccggtgtggagtctgtggggaaaggggccttcgaggatggggtgaaagagggatcgctattagaatgtataggatgaatagagaacagaaaaacgtggtgccgatgtcaccacgaatttgtaaccatttcggtggaaagctgaaaatttaacaatgaatggcaagagaaaagctgcacaaacccagtgtttgtgcggatttttggcggagacggtgggagtctacccgcgggctaaaaaacatgccactggcatgtttttcccggcctgcggaccgtcgtcctgttttcatctccacctttcgactgcaaaacaaagaacaccaacctccggctggtgttctttgttttggcggaagcggtgggattcgaacccacgagcccgtgagggctacctgatttcgagtcaggcccgttatgaccacttcgatacgcttccatataataaatattcagttttggcggcaaatcacattatttcgagtgctgaactttcgtcccctcggacagctctccatttatgccaacttagaaaaacagcaaccagcaaatttgttgcggcattaccgcccgcttcttacagaagcagtatttattttactttttcttctgaaaaaagtcaagtgtataaaaattttatgacgaaaattattactaaattttgaaataccctgcgaaaagacttctttatactttcgccggatttcgcttcgtgaaatgtcacaccctgtttttgtcggcatagtataaaaaagcagagtaatatatcaaccccaaaggcaggtgatatttatggcgatggatacaagagagcttttcgcacggctgcttcaatgcgaagctggaggcgaaggaccggaagggattgcttcagttgctacagtcgttatgaatcgggcgaccgtcccatatggcgaatttttcaggattagccaagggggagatgtcagaaacattattgaacaaatgggacagttcgtttgtatgcgcacttcggtcggaggacaatataatcctcagaatgtatacaatatttccccggaaccgctcacttatcagattgctgactgggcgcttgccggaaatacattttcagcagtcggaaactcactgtttttcttcaatccattcagcgatacctgcccgcgcttttttcccgcaaacggaatcggtattatttacaataggataggagaccactgcttctatgcgcctaccgaaaaatacgctgacacataataatcgataactggcccaatacatttttaggaggtaacattatggataacaatcagctcgatcttggaagaatatatggtttgacaggctgtccggaaggcgggtgcgtatatacgggagagataattcccaatataccgtcacttgaacaaatcgccgccgtaaactatgcccagcagtacctcagcccccggtatgctacgccagagctgcagcagggtgtcgcggagcttgagcaaacactcgaagccgcacgccagcaggcggcgcggcagcaagctgcgcgggaacaggcaagcatcagcggagcggccccgccattggctggtatgaattcaacaggcatgggcaccacatcgcagcctgcgggtaccggtatgatgccgggaatgacgcccgcaatgatttcaaacgatgcggcaaacgcggctgccggaatggctccggcgggtatgcaggccgccacaaacgacttggcgcctattactgagtataaccagccgttcccaatcacagcggaaagcatacagtacctcaacggtttcctgcgtacacaaatcggcagaagggtggaaatccagatgctcgtagggacagacaatctggtcacaaaggaaggctatcttctcggtgtcggcgcaaattatatccttattaacgagattggcacgtccgatataaccacctgtgatttttacaacatcaaatttgtccggttcttttatgaataagagctagccccataagatttttgcggtcaaagtgttggaaagaagaaatccttcctttgtaaaatgtaagccgtctttccttcggatgagcaggccgcttttttcaaaacgcatggcattcctgatatatttttcaggaaaagccatttgaaaacgttcctcatacgcgcggaattgaatgccttcacaaaggcgcagggcaagcatgatatattcttccggcgttccgcccgaaccatcctctttcgttttgccttcgtaaaaatcagaaaaactgcgcggcgtataaaaccgtttgccatttaaaaacgagtgcgcagccggcccgatgcccagatattcctcacagcgccaatatttcaggttatgccggctttcttttcctggttttgaaaagttcgatatctcatactgccggtatcccagtgcctcaagagagtcacacatagtaaggtatagctcgctctgcttgtcgtcgtcaggcagggcgagttctgtttttcttttttcataaacggttccgggctctattttaagaagataggcggaaatatgttccgcctgaatgtgcgcgcaaaaatcaattgatttttgcaggctttcttttgtctgttttgaaacaccgaccatcaaatcgagggaaatattatatattcccgccttacggatttggtctgcggtttcggctgcgtcctgcgcgctgtgctttcggccgagcacgttaagctcttcctccacagcggattgcagtccgatggaaacacggttcagcccgtgtttttttaattcgggaaaatcaagccgaagaccggaagagggatttagctccatcgtaacttcagcgttattcatagaataggcgcttgctgcggtatccagaattctaatcaggcggttcgtacccaataggctgggcgttccaccgcccagatatagcgtatccgcctgcctcttattatttttcgcagccagttcgattctctggcagagcgcatcggtataccggtcggcttctgtctctgtaaaatgtatggaaaagaaatcgcagtacgggcattttccgttacagtaggggatatgaagatataatccaatcggccgcataattaaatccacctcgccataaaataaaggaatacaaaggcgaaggagcagaaacgtttctgtttctgctccttcaatttggaaggtatatgaaaaaaaggaaaaagcaatagaatatctttggcaacaatattaaggatagtgtttttttaataaaatgtcaataccttgcagaaccctataatttacataatttttacaatcgtgttttcttcgattgacaaagacgtgccagaaatagtaaaattaaaaatcagagtgtaataaattaacaatttttttgggttggaggaattgctttgcctgatttaaaaaacgaaattcaaaagcgcagaacctttgccattatttcacatccggacgccggtaaaacgacactgacggaaaagctgcttctatatggcggagcaatcaatttggccggctctgtaaaaggaaaaaagacagcaaagcatgcggtatccgactggatggaaattgaaaagcaaagaggtatttccgtaacgtcgtccgtgcttcagtttaaatacgagggctattgtatcaatattctcgacacacccggacatcaggacttttccgaggacacctaccgcaccctgatggcggccgacagcgctgttatggtaatcgacgcttctaagggcgttgaggcacagaccatcaagctgtttaaagtatgccttctgcgcaatatcccgattatcacgtttatcaataaaatggaccgcgaagcaaaaagcccatacgaattgcttgaggacatcgaaaatgttcttggaattaacacctacccaatgaactggccgattggctgcggcaaggaatttaaaggcgtttatgacagaaagctcgaaaaaatccttacctttacggcgaacaatggccaaaaagaggtagaggcgcgttcaattgggctttctgacccgtgcgtgaccgggctaataggcgaaggctttaaaaagcagctggacgaagacgttgagctgctcgatattgccggcgattcctttgatatcgaagcggttcagggcggcaggcttacgccggtatttttcggctcagcgctgacgaactttggggtggagcccttcctggaagaattcttgcgccttaccaccccgccgcttccgcgtgaaacgctagacggggaggtttctccatattccgaggatttttctgcctttgtctttaaaatccaggcaaacatgaataaggcgcaccgcgacaggattgctttcatgcgtatctgctccggacggtttgaaaaaaacatggaggtataccatgtgcagggagaacgcaagcttcgtttatcccagccgcagcagattatggcgcaggagcgtgaagtaattgaagaggcctatgccggggatattatcggcgtgtttgatcccgggattttctctataggcgacacgctctgctcgccgaatgcaaaattccagtttagagggattcccacttttgcgcctgagcattttgctctagtacgccagaaagatacaatgaaacggaaacagtttataaaaggaacaaaccagattgcccaggagggcgctatccagatttttcaggaaatcggcgccggtatggaagaagtaattgtaggtgtggtcggtacacttcagtttgatgtgctcgaatatcgtctgaaaaacgaatataatgtagatattatcatgtccggtttgccgtatcagtatattcgttggattgggaacaaggacatcgagccgaaaactcttgatttgtcgagcgacacgaagcggattcaggatttaaagggtaattatcttttactgtttaccagcgagtggacaatcaattgggcgctggagcataataaagggcttattttagaggaatttggcaggtaaggtaaatataggaatttatttcttgtatttgattaagaattatagtatgattttaaggtagaaagatgtaatcgattttacctgcgctgtttaaataaattgataggacttgcacaaatccccagctccccgaataaaataaaccaagtgttattttatcgagggggaggaactatgtttttagaactgctccagatgttcggcaacatgcttctgttctttattctgcatgttacgggcagcggcgcttttcccaggccgctgtcaccgcaggaggagaaggaatgtctgctgcttgccaaagaaggggataaaagcgcgcgtaataagctggtagaacataatttgaggctggtcgcacatattatcaaaaaatattacgcaaacatcaacgaccaggatgatttggtttcaatcgggaccatcgggctgattaaagcgattaatacattcgacccgaacaagaacattaagctgtccagctacgcatcccgctgtattgaaaacgaaatccttatgtttttccgaaacagtaagaaaacatcccaggacgtttccctgagtgaagctatcgataccgacaaagacggaaacccgcttacactgatggatgtaatgagcgttgaggacaatatcgtcgacagccttgatttgaaaatcaacagtgaaaagctgaaacagtatttgagagaagtgctggatgacagggagcagacggtaattatcctgcgctatggcttaaatggggcagcgcctcttacacagagagaggtagcaaaaaaactgaatatttcacgctcctatgtctcgcgaatagaaaaaaaagcgcttgcacttttaaagaaaaggtttgacaaggcggacggcctgctgtaacagcagtgctacgtgcttgtgaaataaacagagaagtatattaatttggaaaccagccggagattcctccgaatagtggttacggggaggtggacgctatcgtcacaattaaggatgttgcgcgggaagccaatgtttctgtcgcaacgatttccagaacccttaacaacgacaagaatgtgtccgaaaaaacaaggaagcatgtcatggaggtaatagagcggctcggcagaaatctcagggtaagcaaaaccaacaggattttgaccctcgtaccggacatctctaataccttttacagcgaggtcttgcgtgggattgacgaccttgcggaaaagaacgggtatatgactatggtatccacgacgagaggcgacctcgatattgaattaaagtatattatgcagctgtataataaaaactttgatgggattatccttacaagctcggagcaatctccggacgaactatcgtcaagcgcaaaaaaggcccccctcgtcatgtgctgtgaatataaatacggggcggagatttccacagtcctggttgataaccggcaggctgaatacgatgcctgccgtacactgattgaaaagggtcacaggaaaatcgctctggtcacaaacgcgtattcctattccgcaaaagaaaggacacagggatatatagacgcgcttacagaacacagcattcctgttgacgggcaatacataatcaaaggcgggtacgaatactctaacggcttggaggcggccgcgcgtttaataaaccttccggagcctcctaccgcaatcctggcaatttctgacctgctcggcgttgcaattaacaattatataatgagcattggattaaggcccggaaccgatatcgacatttttggatttgacaatacgatgttttcaagtgcgtctattccgccaattaatacgattgcccagccggcttacgaaatcggtacaacagccatggagcttttgctaaaaaaaatcagggatccagaatgcaagccggagtttgtggtcaggccgcatgcaatcatagaaaaaaatcttcatataattaaataaagcataaaaaaggcctgcgcttaccgcaggtttttttatgctaaaaaaacgcttttgagtggaatttatcctggcaatacagaaagggtgttcataaaaagttgcaaaaaagggcgcaatcttgtatactaaaacaataacttgtccattagctgccgtttaagcgggagcggctttttaacttttgagaggttgatgatgatggtttcaattgcggcggcagagagccaaagccccctgcttaaaaaggcacgcagaacaaacgattggatgctctatcttgccgggcctttgattgtgctggcgcttctttcagtcgtatttataatagaaggtctttggccgttcggcgctaaatcgattgcatacgccgatatggcgcagggatatgttccgcgctactatcatttatacgacgccatgcacggatcaaaatcattgttttatgattggtatacgggaaccggagtgaatatggccgcaaacctttctacttatttaagccctctcaatctgttgtacttttttattccgcgggatatgatcctgcagtccatgtccttattcctcgcaataaagatggcgctgatggcttttacagcctgtttctttctcaataaggtttttcctaagcttcccgccaactttaaggttctattctctgtaatgtatgcgttttgcggctatgtattgcagtattacacgaatattatgtggctggaaaccgtcattatttttccaatcctgatttggacactgcttttgctactaaataaaaatagaatcatgccttaccttatcacctataccatctgcctgatattaagtttttatctgacgtttatgacaacgctcttcatcttattctcttccggcctttatattcttcttatgctgccaaaggggaagaggagaaaatgctattttaacttgggcataggaacgctgacgccttttttactcgcggcaggcctgttgcttccctcttatttccatatgacttcatctgcccggatgtcaagctcaggcgggctgctttcgtttcttggcgttaatatggacatgttcagccttcctaatctcaataagcttcttatgttgctgggagccgagctttttattgttcttctttttcgttatgcatataaaggaaagcgttttaaaaaacagaaagcatttttctttacattaattgccatgatggtaattcccattttttttgaaggtgtcaatttgctctggcacggcggctcttatgcgagcttccccgtccgttttggctttatgataacgtttgtgctgatttgcgcgagcgcctattatttaacctattgctatcagccagcgggggaagaaatattgtttttaaagccggttgaagacatgattgaagaggaacaggaaacgaagcaggtaatcagcctgcgtgaacggttatctgatccgctttttataaaacgcctttggtttattattaaaattattataattttagtgcttgtttgcttttcgattcctctgctggtacgtatttaccagctgtttaataagtatggtatatatatgctcacccgcaataacaatgagctttatcaaaatattgtgatggtagctgtattatatattgccattattgtcttgggcttttcactccaatcgaaaaaggtgcgcaacgcggtgatttcaattgctgtaatttttccgatgctgttctattccgccggattaatcggtatagaggtctttgccagcagcgagcatgacagtaattatatagaaaaaacgcttgctgttaaggaatcgcttcccaaagaagaaaatgtactgaagcgaatcaaggacacaggggtacagctcaatacgaactaccctttgattttagagcggtccgcgctttcaaactggacgcatctaatcccgggttccctccaggattccctggacgttttgggttacagcacaatattcacccgaacgctggactcgggcggtactgttttttcagacgcggtatttggaataaaaaacacgctttccctttttgaagaaaatccagacctttaccgctttaacaaaaaagccggtgaatttaattattacgactgtgtttatacgcttccctttggggtcttggccgataaatcaattttaaaaccgttgccaaagaatatctgcgatgctcaaaacgcgctttataaaagcatttcgggcgatacgcaggatattatgacgcgcctgactaccacgcgggaagaagaggccggtaaaattctgagctcgcagaatatccagggtgggaaaaactatcagatacaaatcagggaaaaggaggcgctgtatttttggagcctttcctctgatttgaacctcacagtcaacggagaaccgcttaaaattcccacgctgaagcagcctaataacttgaattatcctacaaactttaataataggctgattctgcttggtacatttgaaaatgagacggtcagcgttaccataaaatcaggcaaacaaattaatgacgacagtatttgttttggtgccgtttcgctcaataaaatgagcgcacttaccgcaaatcttaataccaacgatattcaggcgaacgcctccggcaattcgctcgaactgacagtgaaaaatggggattccggtaagctgctctttattcctgtaggctacgataaaggctggagctgcaaaatcaacgggcaggatacgcaggtgcttgaggcagccggcagctttatggcgatacagctcaaagacggtattaaccagattgaaatgaatttcctgccaaacggattgatacccggtctcttgattagtggaatctcactgctcggtttgcttttaatatgttttctcgtgaagcttggcagaaagaaaaatctcgacgttccaaatccggttctgtctattgccaaatatatttattttgccgcttttgcgtgcgcggtcctcattatatatttagccccgataggttatttggtttataagactttttataaataagcaaacgcccacctgttgttaactcaacaggtgggcgtcgtcaattaaaggccaaatatccgcccggcactggcaacaataaagcataaaagaagtccggtcagggtcggcagcaaaaaggccagcccggtccattttaagctctttgtctctttgaaaatagtgatgcaggtggtcgaacaaggaaaatggaacatataaaacagcataacgcagattgccgtaacaattgtccagccattttggagcaaaagggtatgaaactgctccaggctttgcatatccgcaaggctgcctgtcgccatgtatgacattataataatggggataacaatttcgtttgccggaaaaccaagaataaacgccatcaaaataacgccgtccatgccaaaccagtgcgcaaatgggtccaggaagtcggtacaatgctttaaaacactaatatcgccaattgttatattagcaagcagccagataatcaatcctgcgggaacagcaacaacgacggcccttcccaatacaaacagggtacggtcgagaatagagcgtatgattacttttccaatttgcggcctgcgataggggggaagctccaaggcaaacgaagagggtaccccttttaaaaaggttttagagaggaatttcgataccagcagcgtcataaacacaccaagcaatatgacgcccaatagaatcaaagccgaaaaaaaggattgtaaaggcaaaatgacggcaccagcaaagaacattgtaattattgcgattaatgctggaaatacgccaccacccaaaaggcaactctgaactgaacgacgagtaggtggctgataatttcttactcgttgtcgataaaaatatgcaggtctttcccatcccaaacaatttttttgacaagcagcttaatcaaagtacgtttttcatggattgaaaggatgttgaagtgatttttcaaaccggataaggctgtggcaagcaagtctatctgcatttccttatccgtgaattgattgtcgtttttaagcagttggccgcgctttttttgcagttgagataattcttgagtaagctcggccattttttggttgacacgctggactaaaacaggattactgccttgctgagccaggaaagatactaaattatccatttcttcattgtattttttaatttgtgattcgattgagtctatcggtctttcaactttttcttccttgaagtcatgttttagtttttccaacattttataaatacttgaatttacgtcagtataactcgacaaatattcgcacaccttgtcatccgcttgtataccgcctatattttgacagtcgcatagggctgttccgccgcgtaatttactttgacaaatatagtcaaataatttggggctttgatggcgtgtttttgcgaacatacggcaaccgcatttttggcaataaatcaagccggacaataaagaataatcattgtgcatgtttgaaggctttgtaccgttcggtttgctttcctcaattatattttgaacggctacccatctttcgccggggataagtccgccgtgttttccaatggcaataatccatttctctaacggctgtctgggcgcatgcttttttgtgtagtctctcttgttgtaagcaagaagacccagtttgggattacaatctttttcttcaaaacaaacgtcagaatttttttctacaaaaaaatccatagcgtctttgtcggccgcacaataaacgggattctgtaatatttgcttgatagcgataagggaatagaatttatcattacgcgactttatgccttgttttattaaaaatttggatacagcattcagactgtgcgtttcaaaaaatttatcgaacatcaatgtaacaacagcaatttcatctggtatttctttcagtctaaacgatgttcttatttttccatccatgataacatcttgcgtttttgtagatgtgaatcctgttggcggtgttcctccaagccatcgtcctgtccgggctaacataagcatattatcgcgaacccgctctgcgagagtttctcgttctaattgggcaaacactgaagcaatatacatcatggctttacccattggttttgaggtgtcaaattcttctttaatacatataaaggaaacctcacgctcgttgaggtcttcgattagggatgaaaagtcactcacattacggctgatacggtcaagacgatagcacacaacgtaatcgggtttgcgagctttcaaatctatcagcattttttgaaactctggcctgtctgtattttttgcggaaaaaccttcatctttataaattacaatatccgggtctttcacatcagggaatttgctgcgaatatacgctatacacatttctatttggttttcaatgctctctcctttgcctgtgaagacagatttacgggcataaataaaaaacaatttcgatatagaatttagcatttgctcacctctttttttattataaaaagcaatctatgtcatgtcaaatcttacaagcgctttctattataatttttttgagtataaggtaatttttgctgtgcagcgcccgtaaagttcattattgtataaatatcgcctaccgtcggaagaagatactcctattattttaagcctgttgaaatcatcaggaataataagcaggcatatgttgggggcgggtttttgatatgcactgcggcagaagcccgcgtcttacggctgtcggatattgtgcaaaggcatccgctggaaagcgggctttatacagaaacggttttgattataacgttttacccgcggaagagctgggcgtttcctttttcttaagcgtacaataaattcaggcggctgtcgagtgagacagccgcctgtgtgttttcacgattatgttcattgttctagtcaaagctatttttattcagctaataccaatcgtgtttttcattccggtcaagcgcgttgatgcgctttatttcgtcttctgccagttcaaagccgaacaaatcaaggttctcccggatatgctcaggattactggaaccggggataaccacaattcctttttgcaggttccacctgagaataacctgcgccggggttaccccgtgagcctgtgcgatttccgagatggtctcattgcccaaaagctccgccgtatgccctctgccgccaaacggataccagccctgcacaacaatccccttttcatgaatgtatggaatcacatcgttttcctgataatacggatggatttcgttttgtaccagcgcgggagtgatggtaacctgcggcaaaaattcctctaattcttgcacataccagttggagaggccaatggaacggattttcccatctgtaaccgcctgttccatcgccttgtacgcatccacatcgccactgccggggtgatgtagcagcatcatatcgatgtactccagccccatacgctctaacgctccatctatggcttcctcggcgtttgcaaactggctgggatagagctttgtagcgacaaaaatttcttctctcggtacgcctgattctctcacggctctgcctacagctgcctcgttgtgatacatataggccgtgtcgaccagccgcccgcctgctttgagcagcgtggacacggaattatagcattcttcatccgaaaggctgtaagtccccaggcccatgataggcatttcatacccgctgttgagcataacggttttggtttcaaaattaaattttccagttcttgcggtattggatgaagtgatttcaagggtatttaaccacgcttttacttcatctttggccgagcttggggaaaaccgttctccttccagccatgctgcgccggcacagagggaatgcaaatcagatgcgctggaaccaatcccgctgctgtgagaggtgcaaaacggtacaatcgtttttcctgcaaaatgatagctctctaaaaaggtactgataattcgtggcgcctgcccgtgccagatggggtatccaaccagcaccgtgtcatactgctctatattttcaatgctgccggaaattgccggacgggcggagggattgttttgctcgcggtcggcacgtccgtcagtatagtaagccaaatcctcttctgtataaggaatctccggcacaatttcataaatatccgcgttcagaatttctgccgcatattcagccgcctgttttgttgtacctgtggctgaaaaataggcgaccagaatttttgagttatcttttgttggggaactgttgtctgtttttgttgtgtcggaaggattcggcaccggctcatctttggacggttcgccgctgcatccggacaagctcaatatcaaagcaaatgataaaagcatggcaatgaactttttcataacctggtttcctttcgtttattttcagtaatctaagctcccggttcaggagcttcttcaattttcttcattatttttgcgggtacgccgcccaccaccgtattggctgggacatcttttgtaacaaccgcaccggcggcaacaatcgcatagtctccaatagttatgccgggcaaaatggtggcgtgcgagccaatccagacttttttcccgatgtgtatcggggcggggaggttgtcggagcgcgccgatgggtgctgcccgtgattgattgttgccattacaacataagacccgatgagcgtcccgtccccgatataaataccgccgtggtcttgaaaatggcagccgcagttgataaaaacgttctctccaataaagatgttctttccgcattccgtataaaagggcggaaacatcgaaaaggtttcgggaacgggcctgcctgtaagttttgaaaacaggcggcggatttcttcttgttcatgacagcgattattcagcgtcgcggtaatccgcatagcctcttgagcaagctggtgcatcaattcgtgcaaatccgagccgcctgcaacacatttcccttgccttaaatagtccaaaaactcctgcatattcataaagccgctccgctcgcttatctgtaagatttctcaaaaataccggcgcattcttcatcggacatggggcaggggtttgccaggaacaaaccgcccattgtctcacgggcgttgacggcaagcgccatacattcctctttttgaattccatattcggtcatcttcaaatcagcaacgccgcatgctttctgaaggtgaacaagcgctgtgataaaatcctccggtctgtcggcgttttccatccccatggtccgcgccattttgataaactgcccgtcgcaggcgtgtttttcaataaagaactctgcaaaggctttggaaatcataatgaggccggcgccgtggggaagcttgtggtgataggcactcatggcatgttccatggagtgctgggcggtggtgctggtgagctgcatggtcatgccggcgatggtgctgccataggccacatgctccctggcttctaaatcgttaccatcccttacggcacgtggaaggtagcccgcgatgtgctcaatagcggagagggccagggcttcgctgaaaatgtttaccccgttgctcatcatcacctctgtgttgtgaaacagggcgtcaaagccctgaaaagcggtgtatctggaggggacggtgcgcatcagctccgggtccacaatagacagcacgggaaccaggcgggggtcgccgccaaaaccgattttttcatgggtctccgggttggagatgacgccccagcagttgatttctgagccggtgcccgccgtcagggtgatggttacgatgggcagaggcacatttaccagaggctgtcccttgccggtgccgcctgccacatagtcccacaggtcaccgggattggcggccatggcggcgatggccactgaggagtccagtaccgcgccgccgcccagcgccacgataaagtcacagccgttttcccgtgcgaaggccgcgccttccatcaccatatcttttagtgggttttccatcaccttcgcaaactccacagcttcaacgcctgccttatgaagctgctccagcgtgcggccatacgcaccgcttacctttgcggatttaccgccggacatcagcagaagcgccttttttccgggcatcggctgacggcccagctcattgagctttccgctgccaaataagatttgtgtgggattgtaaaagtcaaagttcatcataaaaaattcctcctaaaccatttctttttgaatttggtaaatcagataatcaaggcaatcgatttgtttttgccctgaacgtactgtgccaagcaactccgtcctgtaccttgtgagaattggcagcatcccgtgggcgtcgccgttcattacaaagcccatacatttttctgccgtctgttggtcgcagcccgcgtccattaaattctgataaatgataccgattcgatcggtagcttccgccattgctttgcacctcctatgcttttattataagcgcgccctaacgatatttccaatacttatatttaatggcgcgttattcttgacaggaataacagctttggttatgatggttacagtacatttttgaggagagaatcgctatggaaattcgcgtgctgcgctattttttggaaattgcaagagccggaaacatgacaagagcggctgaaacgctccatatttcacagcctaccttgtcaaagcaaatgaaggatttggaacaggagcttgggaagaagctctttcggcggggcagtacaagcctcagcttaacggacgaggggatgcttttacggaaacgggcggaggacattcttgaaatggtggataagacggctgatgaatttaaatcgctcggcaatattacaggcggcgaggtgcatattgggtgcgcggaatcccaccagattaaatatctggcacggacgataaaggcctttaaggaaagttatccgctgttccgctaccaccttacaagcggcaatacggaacaggtggttgaaaggctagaccggggattgatagatttcgcagtaatcgtagagccgccgaacctttctaaatataactatctggaagtgccggaggtaaatacttgggggcttgtcatgaaaagggacgacgcgctttccaaaaaagaaagaatatgcttcgatgatttagttggccttgatttgatttgttccgaacaggcaatgcaggtggatattccgagatggtgcggcgaaaaagcggatattctgaagctttcgggcacgataaatctcgcctataatggctctgtttttgtgaaggaggggctggggtatatgctttcctttgataagctggcagatacaggcgcggacagtgagttgtgttttcgcccgctcacaccgcctttagaaaccaaaatgtatgtgatatggaaaaagtatcaggtgtttacccctatagcagagctgctcctcaacgagctgaaagcgcaattatataaatagtgggtacacaaatgctggagcagtcgtcaacaatattccatagataaggaaggccggacttatttgtccggccttccttattgcccagtctacgcagaaaaagcagtcaatggggctttgggtgttcaatttgtatttttgtcaggaatcaaaatgttttctgctcccggaatgccaagccgggataaaatattcaaattgctgcaaagttcatagtgcatcaaatcctccagtttggcggagaactgggggaaatctgttttttccaaagcttcaatcagctcatcataatagggggcgtatatggcattgatggcttcttggcttcccttcatgcctcggagcgcatagccccaaaagttctgccgcagcagctcggagtaaacggtttgtatcgtttgagaaggggcgcgttttgcaatcaaatccagcacaaaataggacagggtttcgccgcgcagccactgtctttgctcttttagctcattgcacaacttaccggccgcagcggcatcaagcgaggaaagcgtcagcatagatacctccctgcaggacaagacgaatacctggagtccttccgccatacccaaaagccggcgttggagaacaggcttggtaaaatcgctgttctctgtggctttgtcaaacggcaggacctgtgtacccacatattttgccgccttgatggccccaatactgccaagaagctcaagcgcccttcgaaccgtgcttaccgaaacattcttttgttctgcaagctccttttgggaaggaagcaggctgccgacgggataaatccccctgctgatggagatgagcagttccatggcaagcgaatagcacagctgccggccctttttgtaagaactccaggtaaaggttacttccttttcaagagaaggcgtggtgattctggcctcataaaacctggtaagagctaaggtcagccgctcgagtgattgatccatcgcagcacgcagcgcaggccagtccgcattttggcaaagcgacagaacctccggcagataatcagcagctccatcgaagtactgcagattttcttcgacgctgaaaaaaggattttgcaaaaacatgaagacctgccagacaagacgcatgagcagtgtgtttccgaaagaactgtatttctgattgaggtgctccagcatcgcgtaaggagccatcgccgtgtttttttcatgaagaagctgttccatcgcttgcagtgtctccaaggatgcgtgtttcagtccagtccactgggcgttgccgaacagaggctgcatggctcttccaagatcgatcatcgcatgcttgcgtgcggcaaaaaaggtttggataaattcttctgtttcctgattgctatattcaaccttaactgtggcgcctgcatttttcaacagggtaatatacccgtcttccttgagtttcaggtaggcggcccgggctgtatcaatcgacacgcaaagccgtgcgctggtttcctctatggtgggcagcttctccccataacgataggcgccaaattgtatctgggtcagcaggacgctataggcgacttggcgcaattccgtgctgtttttcaaaccgggtcccccattttcaatgtaatacaatatatgatgaattcagtataccatttttaaagccgcgtttctacaatcttttataccgttcggctgacggttgctatttttgcagttgtttgctatacttaaaataaatatgcatgtgaacaataaggcggtttttccggcccgcaaattttgattgtactttcttgtgaaattcgaccggcagggcatagttcgaaacgggcgggagctgttctatgaggattaaagcgacgtcagcgaacaggagcggctggccacgccaacgcttttgcggccgatattcaaaccgctatgccgcgggggcgattgcttatgtatttaaacttatcgatgtagccgtgccgcggggcaacgctcggcgaggtttgcggcaataaaaaaattgattgggcggcagtatcagggaagggaccgtatgcggccggaacgagcgaggggctaaatagatgcgaaaaattatgaacaataccgagggctctctggggctaagccagcgaatgagctttgtcagtacagcggtactcattatactgatgctctgctacctgattatgaccatcagcaattccaccagtttggctgatcagacggagataatctcgaaccatccctttgaagtggtgatttccgctggcgatgtgaagctctatgtatcggagatgagcctgcgcaccgggcggctggtacgccatttcagcggcgatgacgtggcgtttgccagaaccaagctggaggagctagaacactcactggatatcccggtagccgaaatcgaggaactgtatctgggcgacgcgaaagacgtgcaggcgctcaaggatactctggcgctcttgcggacggagcagacggattatctggacttttgcgccggttctgatgttacggcggaggaaatcgagacttacgcgcaggagtacctgcagccactgtacgaccgggcgctccagcagacggaagagattatttcgattgcacaggaaaaaaaggtaggctatggagttaccgcggagcggctgcgggttactaacctaatcggctctatcctgctgatgggactgatgatcgccgtgctgctggtctcccaatatgttctgcaccggcaacgcaaggagcttatttaccgcagcaagcttttcgacaacctttccctgagcattgacgatgcgttcatcatctgggatgcgggtaccggcgccatcagctaccgcgggcttaatctggagcggattctgggaagcaggatagcggacctagatagcctttaccagggcctgaaggatgaggatgcccaggcgttacgggaaggaatcagggttccacagtttacttccccctttgagaaactggtggaatacaccaaaccgaataaagaaaaacgctggatgctgatccgggtctatcgcactgagaacctccgcaccccgcagttcatcacagtgttttccgaccgaacggatgaagcacgttcccgccaggcgctgcaggaggcgatgctgacagcggagcgcgccaatatggcgaagagtgaatttttgtcccgcatgagccatgagatacgcacgccgttaaacgccattatcggcatgacaacaatcgcggcggcctcggtcaaagaacccgccagggtggaggactgcctctcaaaaatcaccttctcctccaagcacctgctgatgctgatcaatgacgtgctggatatgtccaagattgagagcaacaaaatggtgctgcaagaagagcccttcgatatttttgagattatcaacggctttgtctccaccgtttatgctcagacaaaagcgaaaggaattgaattcacagaaaccatggagggctttggaaaagacacggtctttatcggcgactctctgagactgaaccaggtgcttttaaatctcagctccaacgcggttaagttcaccgccccgggcgggagcatccatctgggcgtttcccggcataaaattggaaataccaccgatgttcttcgctttattctctcagataccggaattggtatgacaaaagaggctgtggctcgcatcttccagccctttgagcaggccgacgcctctattgccaagcgctttggaggcacggggctcggcatgtctatcacgaaaaatctgattaccctgatgggcggccagattcaggtggaaagcaatcctggtgtgggtaccgcctgtattgtggatttgccctttaaaaagggggaagagagctgtctgccggagcctgatttcgctcggcaggggctgcaggcgctgattgtggacgacgagcagcaggtttgcgaacagaccgccgtgcttttggaaaaaatcaagattaatgctgaatggcgcctttccggctctgagggcattgaatgggtgaaggagacgcaccgggagggccgggatatagacctgtgcctcatcgattggaaaatgccggatatggacggcgtcgaagtaacccgccgcatccggcgggaggtggggaacgatgttcccattgtgatgatttcggcctatgatatttccgaggtagaggaagaagcccgggctgccggcgtcaacggcttcctgcctaaacccctctaccgctcctctgtgtatgccgccatcaagtcggcactggagcacaaggtgcagccgctggcagacggggaggaaaagcctgacggcaggtctttgacgggcttccgtttactgatggcggaggataacgctctcaaccaggagattgcggcgacgctgctgcgcatgaacggagcggcggtagaatgtgtagatgacggccagcaggcgctggatgcctttcttgcctcaaagccgggcgattacgacgctatcctgatggacgtgcagatgccggtcatggacggccacgaggccacaaggcgtattcgtgcttctaaacatcccatgggccttatcattcctattattgctacaacggccaatgcgttcagcgacgatatttctgcggcactggcggctgggatgaatgcccatgtcagcaagccgctggatgtgggagagctttgtaaaatactagcggattgcatccgtaaaacggatagttaaacaaaaaacacctagtcatattattttctacgtactaaaaataagcttgaacaaataaattaccaacaaaaaacatccccaagtgtagaaattcccgggggtgttttttgttgctataaataagtttatttcaaaaatacgacagaataaattgaaaaaatcatatccaaaaaggaaatacacaagagggtttcatgatttgaacacagcgacggggtgctccgcttacttgagatggttaggcatgactatggacaatcatcaattccggacaaaggtaacagctgccattttttaaaagtactaggacaatcaggaaaaatcatatgatagaattgtaagccatcccaataggggagggagtgaatgaggaaaaaaggggcttgcaatgtgatagtacatattgcagatactttggatgataacacccatgccaacaaagtaagtgaattttatgttcagattattaaacgcagattaaatgaatcagacttatccactgttgaaaaaattactgttatcgataaaatcattgaaaatttgaagttacaagagtaaactattgtcaaataaatatttgtggggccgccataggagatatggcggcccgctctttttcagctcccagcttcgcagcgcggcaacgcttacaccaagcgtttttgcaaatcactgccgtcatcacttagcaacattttattgccataggtgtggtggcggaaaccggccgttgcagggaacaaagctgtttgtaagaaccgctataagccgttcgcgcggagagtcaataatacggcatcccattacaccgcaggcgttgcatccaaagcccatgcacatggatagggtaatatacgctgtttgcgcggttcaaaagtcgcaaaaagcataaaaaaacaaaccaaagcataattttagaaagtacgatttaagcaaaactaaagttaaaaccaccctacataacaaggagaataccatgagcggtccgcctgatgaacagagagatatttataataaaaatggaacggttatcgtagtagaatcaacatattcttcagatgggcgaacattaaaagaaatcataataaatatattgtctaaattgcaaggaatataaaacaaacgtatgtttatatctcatttgctacaatatttgttacaagacagctattgtaggttttcaagtgcaaagggggagtaaaattcttgaaagccaaacagcaaacatataacgccgccctttatatgcgtttgtcaaaagacgacggggaaatagagagcgcgagcattggcacacaacggaaaatgctccgcttttatgcaaaagaaaacaatttccctgtgtatgatgaatatatagacgatggagtaagcggtacaacctttgaacggccggatttccaaagaatgattagtgatattgaatccggccatgtcaatcttgtaataaccaaagacctttcaaggctggggcgcgactatatcaccgccggagagtatacggagttttatttcccagagcacggcgtaaggtatattgccattaacgacggctatgattccattgacgaatacaatgatattgccccatttaaaaatgttgtcaatgaaatgtatgcgcgggatacctcgaaaaagatacgaagcgcttttcagacaaaaatgaaggacgggtgttatataggtaattttgctccatacgggtatatgaaggatccgctcaataaaaaccatcttataattaaccccgaaacagcgcccatagtcaaagagatattttccatggcggagcagggggagccgcccgctgcgatagcaaagcatctcaataacagcggtttcctcactcccgctttataccgctgttataagtatccctatctagaccccggcgtatatacacaaagaaaagaatggacgtcttctgccgtatgcaaaatgctgcgcaatattgtgtatatagggcatactgctcagggcaaaacaacaaaggtatcctttaaaagcagaaaaacgcttactaacccgccagaggattggattatagtcaaacatacccatgaccctatcattagtgaagagcaattcaacactgtaaggaaccgcagtatatcaaggaaaagctcacctcatagcggctttaggaatatcttttctggaattgcaaaatgtatggactgcggaaggaatatgtcaaccacgaacacaggagggaaaggagccgtaagcttggtctgcggcggatataaattatatgggcggagggagtgcacaaaccatttcatcgattacaatatgctttatgaaattgtcgcttttgaaattaaaaagcacatatctcttttgcagtgggacaaacaatctatcttacaggaaatgcagcgtcatgttccaaaatatgaggcgggcactgaataccagaaacaaatctcggtgctaaaagcaagagacagggagctcgatgtaataatacggcgcctctacgaagataacctttccggaaagataaatgacgaacgcttccgccgcctgctttctgcatatgagctggagcaaaaaaatattgccggtcaggttcaaagcttatcaaaatgcatcccgacagaagcttcaggcacaaccatagaatcacatagtttacttaatgatttcacaggcctaaaagagcttacgccagagctgcttcataaattaatcgaccggattgaagtagggcaggggtattttgacaatggcctcgcaaagcctggacaaaaacaccagacgattcggatatattatcgttttaagagataacagccaatgcgcaataaaacgattcaaaaatggtcttgcagcccctttttatcctgcatattgggaactaaagctcggattgttgctatttcataaaaaatatggtaaaatttttaccatattgttatgaggaggagctttatgacgaaaaaaagggaatctggaatagaattgctgcgcatcattgcaattgtacaggtcattattctgcatacatattcctatgcctcagttgggaacgcggcgttggaaattaatcaggcggcttctggctttgcaagccttttctggtcgttttgccgtacgcctgtcaacgtgtttatattgataaccggttattttttggtaacgtctgcctttgatttaaaaaagaatataagaagggctactaagacatactccgctatgctcttttattccattatcatttccttggtcttttttattgctgctcccgtgttatttacagaaaaaccagcaaattttttcagggcgtttctgcccttcttttcaagagaatggtactttttaaccgactatatcattattttgcttttatcgccggtcatcaacgcagcgattacgaaaatcgataaaaagacttatttatggctgctcggcatattgtttgtcgttttgtccgtctggcctaccgcagcggaaatggcgcctttcaaccaggtcatcagcgtaaccaaaatagtagataccgaatttggcaagagcctgtttagctttctttttatgtatatcctcggcggctttatccggcgctttacatccccaaaaaacaagccgcaaattaaatacctgctagccttcgccggcctatgcatactcgatttttcagtggacctgctgcttcataatcatccatctgtatattctgatgtatacggaatgtttaataacccgcttgttgtcattgaatcggccatgctgttcctgtatttcagggatatgaggttccaaaataaatggattaacctgcttggcggaacaacgctgggtgtttatgcgattcatgagcatcatcttttccgtacgtggatttggaatattttcaattttgaaagaaacggttttattgtttcagagctgtttattttacaaattgtgataacctgcgttgggttattcctggtattagctttcattgaaatcctcaggcaaaaactgtttcagtttattgaacatttctatcatagccgcaaacaaaaagcagccagcaaaattatagaataaattttaaaaaatgccttgcccctgtataacgggcaaggcattttacttttataggcataaaacaggctaattttttaatttatctatatcaacctgtttttggaactcgtgcacctgttcataaattctccggcagttgtcatgatcatcgtaatggtaaaaatcttccacacgtgcaacgtattccggtttcataacacaattgttttccatatattcgcaaagaagctcgacaagatgctcactttcggtacaaatctcaccaaagcccatcgtatcataaaagaaacaaccgtcctcataatgcgcgggcagctgggagggatgaaaataaacaatcggctttttcatatatgcaaagtcgaattgtacaccggagtaatcggtcaccatcaaactggactgcgtgagcagcgcttcatagctgatatcaaccgcaggaagcacctccacttcgctgtttgaggtgaaatcctttgcctggctggttaaaattgggtgaagcacatatttaattttatagccggtcctccttgctgtggaaagcagcttttcattattaatcaaattattataaatatgataataggttgtatttttaaagtcaggattgtagtcacggacttgtccctcgctggcggttaccggcatggcgttatacattctccatgttggagaaagcataatctggcgttggtcgttattaatcaggccgtcgtacctggcgatacccgtcagcttgataatatcaaagcctttatagttataagcgtgatggttcagatttaccgcctcgtattttgaagcaataaaatacattctggtattatcgacaatacgctgctgtgccatcgcgcacttttgtaccgacagcccatgctgcaggcacatagatgggaagttgcagaaatccctgataaagcgggagcggtccaggttataaccgttaaaggggaagacatgggaatttgtaattaaggcaatatccgtatgcaaaaaaatcaggcggtgctttacagatttgtttatgaccggccgaaaaccatcttttttcagctcatgatattctttcgcgtttttgtcgatgatataatatttcgttattccatcattaaatttcccgctgtacctgtacagatattcagcgctgtcgccgcctttatacattttgtcatacatcagccatattttctttttataaaaaagaggttttgttagccaatataaaacacgcagggcaaagccctttttactctctttgaagacataaggaagatacgacagctcccttatgagcgtattatgccaggaagctttgcggataacaagctctttcccctcctgactgcatacataacggttgaacctccaatatgaatttttgggcagggtcgtgagctttgaccaatggcccacatatgataattgcatcggtgctgtcgtattgccatatgatgcaaaaaaagcaatgctttgtacaggcaggctttcatccagttctaactctatatggaacgtaaattttttataggcgctgacgccgaaatatttcgtgagagagtaacggtcgttgtattccagcgggtatttatggtgttggaacacagcatacagattcagttcattggaactgaacaattccctgaaagagccgtcaatcattatttttccatcgcggtattccataacatggatttcaattcgctgggacgacatcgcgacgatatggatattattgaaattcaaatacagctcctggttgccttccaccttattatagggcagttctttatccagtccgtattttaactgcaaaaacattttagatgcgtccaggctgtaggccagtatttttgagcggtctttttgcaaaataatatcatcgtctatatacgacaaaacatcttttgtaaccgcgaaaaattctgcgagttctttctggttcatgtttttcttgttgcggttatccaggtttgataggaatctcgcctgaatctgatacatcgcaaaaaactgcactagacgcgaaacctgtttgtctgtttttttatactgttccagcaaaggcagtaaaaaggtgcggaaggaaggcgtataccaatttttatcgttagctggaaagtgataaagaaaattatcctcctgcggcgcataaaaatggtaatcgccctggcttgtaaccgcaaaccggggatgtttatgctgtatggagatgacggcttccagcccagcctggttataggggagtgtttcattaaacgaaacctcttttaatacgtctgtacgaaaaagcgcgccatgcagggaaagctgtaaatagtcaggatgctgctgcgtacttactggatgcttttgcaaaaaacgttcgttgtttgtaaggctggcttcatccctgtcaaggtaggggataaagcaatacgactgaacagcagcaaaagggagcttgcttttctctagaaccgacaggcatgaatcggtaaaatctttactgagcgtatctccgcaatttaagaatacgcaatattgacccctggctttttgaagcgccgctgcacatgcgccgccgtaagaatacggttggaccggtacgcgcgtataggaaccgtcatttttaatttgtcggcactgggcatcgtccgcagcaagaattacatcagctttcattcggtctgcaaaactttgatggcggatactccgcagggttttatttaacgcctctgctgattcaagtcccagaataataaatgaaatatcatgtacctgcatatgttcctcctaaaagaacagaattcgtaatattataccataaatccgcccttttttaaagtttatgtagtttccagtgcaacattcgtatacatagataaaagtaaataccgcttcctttgccatctggtaattttgttgcaagctttgggttttcagtacaaaaaaacagactgtaaaaatcaggcgcaaaccattcggaagcataaatttctccatgcacatgctgagggcctgcttgccgtgcgcgtttgcttttctgaaaaacttatccatattaaaagcaatgcggggaagatagccaacgtcctccagcagtgtaaacaacggaaaaaatattgccataggaggcagcataacagacacaacccaggcggttgttctaaagatacccgctaaaagtaaatcctgcagccactgcggcgaatgtatccacaccataaaggcgcccagctgctcttccagccaggaaaaaaggctggacagcaaatcggatgggtaattggcccctacaatggtaatccagaaaatcaaacccaaaagcaatagcataatgggaattccggttgatttggaagtaaggattttatcaattttcctgtcccggctgttatatgacgggttgagcagggtgacgcattgctggtaaatcgcttcgctgcgttttacgattcccgcgacgattttgtctttaatgttatcgttatgtatccctcgtttttccaattcgtccttggcctgtgccacgcagccgttgattttttccattccgtctttttcaatctcataacacgaaaaaatccgttcgcttaaatcctggtccgtatcgagcagcttcaggctcaggaaacgcggaagaatgccgccgggaacatatttttttatctgcggctccacaattgacaccgcatactccgtatcttcatcgtaatgaagagcgatatgaaatacttttttttctttataaacgacctgttttaccgcctcgcacagggcgtcgagccctttaccgcttcgcgcgctcgttccgacaacaggaacgccaagctgtaaagacaattcgtcgaggtctatctttatctgctttttctttgcttcgtccagcaggtttacgcatacaaccacattttttgtggcttctaaaatctggagcaccaggttcagattacgctccaggcacgttgcgtctactacgacaataaccgcatcagggttttcaaagcaaataaagtcccgtgcgaccttttcctctacagaactggacatcagggaataggtccccggcaaatccaccagcgtatactgtgttgcgccgtattcatacgttccgaatgcgttgcttactgttttgcccgtccagtttcctgtatgctgtttcagtcccgtaagtccgttaaacaccgtgcttttccccacatttgggtttcctgccagggcaatgatttttttatcgtcacatcccatttacagaatccctcccggaatgaaaagcagatgaccgtcaagcagccatctgcttttccagttattattcgctgtattgaaccaatatcttatttgcgtcttcatcacgcaaagcgataactgcacctctgatataataagcgacagggtcgccgctcggactgcgctgcagggcttccacatttgtaccctgaattaatcccaggtcgagcatgcgcctgcgctgtttaccgtcggaaagcagtgctgcaacgcggcaccgctttcccacaggcaggctggttaaggaaaacgtattcgtctgcattttatatatctccgtttcgttagggaatttcccagaatacgcggcggtctaccgcacattcaattattggattttctctttactacaatatgcattttttccggcattgttacaccgaaaagagccgcgcccagcatgggcgcggctctttgtttttggggaattccagattaagcagcgataagctcctggcttgaatactttaattttttcggcagtacgccatacaggaaagctacaatcacagcgaccgcaagcgtgtcgaaaatcttcatgacgaaaattccgaaaaagcaggctggaatacgcggcgcgtgcagatactgtatcgcccagttatagaaatggatttcccattgcgcagtaggtataccgccgtcccgccaaacggttacagccgttgacaaaactgctgatacggcgatgacaagcacaaccgttggtaatatcctccgccacctgattttaccttcttttttcagcaaaaggccggctatcagcgcggcagccgcgctgaccacgtaataaatcagcgttgtcctgtcaaacacgaaaagcgcaaggtaaaaattatttgcaaggccgacaagcaggccagccgcgggctccaatacaagtgcagcgaggacggttccggtaatgtccatccagacgggaaggctgaagtgcgaggcgaggttatacagcgcaatgtttaaaacaacgcccagcgccatcacaatcaaatagcgcgtccggttacgcatgtttttcctcctccaatcccttttcctgttttggcttcagcctttcttccttctccttattgatttcttctaaaaagcctcctgtaacaatacctgcgggcattgctatgacagcaacgccaaaaagggaagaaatcatgctgataagctttccgacatcagacaccggatatacgtctccataacctacggttgtcagcgcggtcgtcgcccagtaaagcgcgtcaaagaagttgtcgaaagtttccggctcataggaaaacatagcaagtgccgaaacaaaaatgtatgcaagcgcaataaccagaacggaaagaagcgttctgcgctcttttttaaatacgtttgctacatgcacaaagcttttggagtaatggaacaccttaaagatgcgcagcatacgtaaaatacggaagccgtgccctaaaaggccgagggaggggagaagggagacgaaatcgacaatggcaaacggcgtaaaaggatagatagcaaacgcccatggggatttgtgtttcgatacaaaatcatgcgttatccagcgcagaatataatcaaggaaaagaatatacacggtaatgaggtcgatttcctctaaaacagcattgttttccttgaacaaaagcggcgtgatactgacaatagcgataatagaaataaaaaaatcatagaatttactgagcgtttccccgggagcggctttttttacaatagaataaatatacgcccgcatgaatttaagcctcccttaccggaacatatacgccgaaagcggcataaggacatgcccaagcagcgtcagggtgataatcgaatagaacatgacgcgcccgaagaatttcgcaaaatccctgtcttcgaatttgctgcgtatacggttgacgttgattacggagattgtcacggccagaatagtaaagataccccatatgtttacatattcgagcagcccgacctccagcgcgtcggggagaaggttcgcgccgaccataatattggataccgtgccaaacagcgccgcgggaatcatgcttaagggatcgacatgatgatatgtattgaggaacagcacaatcagcacccaagtgctcgtcccgaacagcgcgataaagcacttgacataaagcccccagtcgctgcggttgagctctatctccgtcataaattcatttgtcatgacatttttgttgatttctgggtcggaatggttattatcatattttatggtacagacgtccgtaccataacggcgcagctcatagccagcaatatcgaggtttgggttatagccgctgttttcgttgtcagccttgagcacgacctgttctaccgggtagctgctctcgaggtaaacacgcagctggtgggattccagcgggaaccttctcgtccagtagttctttgtaacggaaatatccgcgcgggccagctggtaattttcagctccgctgtgatagtccttaaccatttccagcttgttgaccgtacctttgtaaaccttgaaatggttcatcatatcaaggtcgttttccccctcccatttgaaccatacaagcatgacggcacggaagctggaggttttaatggagacctccttcaggttttcaatataagtgccgatttcgaccggcaccgccgacctgctcctttgtgccagctcttgattgagtgaatctgtttccgtaaacgatttttcccagtagtcgtcctcagatgccctatcctgaaacagggtaacgaccgcgtaagacaaaaaaacgacgcctgtcacgacaatcagcagaaagcaggcggcaagccgcctacgatgcgtccgttccaattctctcagtttcatttccgtgattctcccgtttgcgtgatattgttctgtccaaaattacgcctgttcagcttctttttctttttttaaggaagaaatcagcttatatactatcgcagcaagggccgccccgacgagaggcgctgcgataaagacccatacctgcgaaagcgcttcaccgcctgcaagcaaagcggggccgaggcttctcgctgggttgacagaggttcccgtaaaggggatgcccaggatatgtacaagcgttagcgtaagtccgattacaaggccggcgacggcattgttttcaacctttgaggttacgccgagaattgcaataacaaatacaaaggttaaaatgacctcgaccaacaaagcctgccacatgccgatgcccagcgcgcttgccgcgccaaagccgttttgcccgagggattggctgcttccgaacagtgctgtgaggattccggcgccagcaatgccgcctaaaaactgcgcgacaatatagccgaaaaattccttgacgcccatcctgccggctatcagcattgaaagggaaacagcgggattgatatggcagcccgaaatattgccgatagaataggccattgcaacaattgaaaggccgaacgcaaaagcaatcagcagggtggaaaacgccagaggtatcccgacgcttacaccgcccagcagtgtgttcgcagcaaccgcgctgccgcagccgaagacaaccagtaccatggtcccaataaattccgcaattagttttttcattgaacgttcctccgtttttttgttttgatttaaaccctgggcgttaggcaaatatgacaatttcccgcaatattccccagactttatacattaatgctataatcccattacaaataattcaataacattactgttttcgcgggatttttaccaaatttcggattagtaattttacattacatatggtatcattttattgaaaatgattcgtgagtgaggttctgttgtgaatattgcgattattgaagattttaaagaggatgcggatattctttatcgctttctttcggaatacgccttggaaaataagcttgtggcgcagtgtacggtttttgaaaacgggaatgattttttacagcaattcaacgcccattcctacgaccttatcttcatcgatatctatttaaaagggctggacgggctggaaatcgcaaaggaaatccgcaaaagggatgaaaaatgcctgcttgtctttacaacctcaagcagcgcccacgcaattaaaagctatacggtcagggctttcgattatctgttaaagccgattgacccaaaacgcctgaaatataccctcgatttatgcagtaaggcgttatttgaccattcgcggtatattgaggtgaaggaaggccggatttttactaaaatacgcttgtccgacattgtttataccgattattacaaccattatatccaaatacatacaaaggacaggatggtaaaaacttatatgccgtttgccgatttttccccgatgctcctcggctatccaaattttatcaattgttatagaaactgtattgtaaaccttgacgaggtggattttctatccgctcgggatttcattatgaagacaggggagaaggttccaatttcccgttctgaaaaaacaaaaatcacccagctttatgccgactatgaatttgataagcttaacggaggttaaacattgattgcactgcaaggcgttttttatgttttagccaatacggtttttgcccatattgtatttttctacaccatgcggcacgagctgcgtttttccctgaaaaaaaccgtattgattgtttcccttatgattgcggcggagcaggcggttcctgtaattcagataatgagcggtacgcccttgacggagcttcaaaatttttatttcctgatttcattgctgtgttttatcccaactacgcttttggtaaaaaaggaagctatattgtctgcgatttttatcctggttgttttcggtacgtttcttgatatagcgacgcttttgacagaaatacttgaccaagccgactggattcatgtaagccttgtttttggagacagtacgactttcttttaccaaatctgtatgatagtgctatcgattccgttcacgtttctttttgctaaaaagctgctgcgccctgttgttgaacggacctactatctgcgtttctggcgttacctgtggcttattccaggatatttttttctgctgtttagattttcggtctatcccaagatttttaaagaggacttttactgtaacctgtcctctgttattttggttgccgtctggtcgcttggtacgcttgtaacctactgcattattcttgcgatgatttataatatctcgcagaacgcagatgccaacctgcgtcttgaggttgcgcagacacagacgaaaatgcaaaaggaacaagttttgctcctgcaaaaaaacatgacggaaacaagagccgcaaagcatgacctgcgccatcatttacgcgttctgcgcggttatgctgaaaagaatgacagcgcgcagattattgattatattgaccgctgttttgacgggcttaagcccctggagattgaatcagtctgtgacaattatgagctcgatacgattctcagctactatatcagccttgcaagagaacgcggcatacgcgtaacgtaccgggtcgcgctcccgtgtgttttaccgctgccggtcagtgacgtctgcgttgttgcggcaaatttgcttgaaaacgcagttgaggcaagctcccgccaaaaaaacggcaataaattcatcgatatcaagatgggaattgccggcagcagcatgattgcaattaaaattaacaacagctatgacgggaataccaaaagaaaagacaatctgtttctttcctcaaaacatgatggaatgggcattggcacgcagtcggtcgcgcatatggccgaaaaatacaacggcgtgctgaattttgagcatgaaggcactgtttttaaagcttctgttcttttatcctcctctgataaataaacgataaaaagggaaaagcgggcgataagcccgcttttccctttttatgtaacggggcggcgcgccccgctctcagccgccgaccgcaggatgggaatcgcacccgctgttcaaaatatttttacagcagcgttcaaggtcctccttgcaggtgatttccatatcactctgcataatctgctcctgcaccataatcggcatcgaataaaaatattcctgtgcggcgttgtcaagattattaatatctgccattttcatcacctcacaatcagtatttgcgcaaagtgaaaaaatatttatattttaatgaacgcatcataaaaaatatggtataatcatatcaaactgctacagaaaagagaggcgcatggacatagatacttcgattgatatttctcagcaattaaaagagcttttggaaaagtaccgtttcagtgaaggcgtgttaagcaaatatctttcccttcctgttcccggtatacgggcgtttgcgcagggagacctttcagtcctgccggaaagccacgaagcgcggttccggatttttaataaaatcgcctttatctacgccatccccggagacgggccggacaaaaagctgcgcgcctttcttcaggtcttactttcttttcatcatgtctcaaaagaaacaatcgcacggatgtcaggcgtcgaaaagtctgaaattgaaaaatttctttccgggttggaacgtgatatactagtggatgagaaatacaagcttgcggttgcggccatgggccttcggttttttctgaaagagctggagccgtaaacagcaatgaagcctaacgtacaggtggttgattatgaatacaagcatacaataccatattggcctgtctgagaacgaaggcgcgcgctatgcaatccttccgggagacccgggacgggtaaaagaaatcgcgcaatacctggagcagcctgcttttgtcgcgcagaatagggaattcacaacgttttccggtattctggcggggaaaagggttctcgtgacgtctaccggaattggcggcccctcggcggcgattgcgctggaggaactctcacatatcggtgtggatgcgattatacgcgtcggcacctgcggcggtatgcaaaagcatgtcagcgtgggcgatttaatcctgcctaccgccgctgtccgcatggaggggacttcacgggaatatatgcctattgagtaccccgccgccgccgatttttctataataagcacgctttcacaagcggctagggaaaacgcactgccgtaccatacgggcgtaatacagtcaaaggattccttctatgggcagcacaatccagacagtatgcctgtttctgacgcgcttaaaaacaaatggctggcgtggacaaaagcgggcgtgcttgcatctgaaatggaatgcgcggcgctctttaccgtggcggccgtcaggggaataagagcaggcgccgtgctgaccgcactgtggaaccaggaaaacggggaagacagcaagggcaaaatcccagcctccgataacgcgattcgtacagcggtagatgcgctttcttatatcatcaggaacgacaagacatgaatgaaagcagtatttgctccctggatttttgggagacagcctatgaaaacggccccctcataaacaggccgagacgggagcgaagaaacgtaccgtgtatcaatttatccgctcttttgtttattttttgattttctttcttacctgtttgtcgtatgtgtgtatttttctgcataatcataaatgtaacatgagttggggtgtgatgttttggttattcgcagaaaaacgctggttatttattccattatccttgtggtggcaatcaccgcgatggcgctaatgggcaatgcgtttcagacagttgcggtaaaggcgcaggcgacgaacgccattccggccgctccaaagcttgtcatcgacgcggggcacggcggggaagacgggggagcggtaagcgccgacggaacaatggaaaaggacattaatctcgatattgccctgcgcctgcaaaagctgcttgttataagcggatgtgacgttatattgacgcgtgacagggacaccgcaatttatgaggaaggcagcgacagcctgaaatcaaaaaaggtttctgacatgaaaaagaggctttcgatttttaatgaggacacggagcaaaccgttatcagtattcatcagaataaattcccgcaaacacagtacagcgggacacaggtgttctattccggacaaaagcaggagagtaatctgttggcggaaagcattagggcgtcggttgtcgggatgctgcagccgcaaaataccagggaaacgaaaaaggccgataaaaacatttacctgctctataatgcaaaggttcccgcggttattgtggaatgcgggttcctgtcgaacgaagaagagcttgcaaagctgaaaacagaggaataccgccaggaaatggcgtttgccatctattgcgggtatctcaattactataatcagaaccaacagggaagtaacaaacagacggagtgattttatgccacaaaaaatgaaaagcgtttatatttgttcggagtgcggatatgaatctgcaaaatggtgcggaaagtgcccgggctgcggccagtggaatacgatgaatgaggaattcaaagaatcctcgaaggtgtctgcggccatttcgagcgtccgcagctcatcctatgcgcgcccaatgcttctgcgtgaaatcagcacacaggatgaacagcgctataaaacgggctctgcggagcttgaccgtgtgctcggcgggggaatcgtcaagggctcgcttgttcttttgggcggcgacccgggcataggaaaatcgactatacttcttcaaatatgcaaccatctgggcggtaccctgaaaatactatatgtatcgggtgaggaatcccgccggcaattaaaattgcgcgcgacccgactcaatgtagacagtgataatttatttatcgcaacagaaacggacgttgaaatcgttgcggagctgattagaacggaaaagcctgaccttgtaatggtcgattctatccaaacaatgaatttaaccgagctttcttcttcgcccggcagcgtaacgcaggtacgcgagtgcaccaacctgctgatgcgtaccgcgaaatctcttgaaatccctattattattgtcggccacgtcaacaaggacggcgcgattgcggggcctaaggtactcgagcatatcgtcgacgccgtgctctattttgagggcgataagcagatgtcctaccgaatccttcgcgcagtaaaaaaccgttatggttcgaccaacgaaatcggcgtgttccagatgagcgacagggggctgatggaagtggaaaacccttccttgatgctcctgtcaggaaggcctaagaacgtttccggtacctgtgttgcctgcgcaatggagggtacccgtcctatccttgcggaaatacagggccttgcaacggccaccggctttggaaatccgcgccggatgtctaccggcttcgactataaccgcatgtcccttctgctcgccgtgcttgaaaagcgcgccggctattttttctccaacgtagacgcatttctcaatgtcgtcggcggtttaaggctggatgagcccgcagtagacctcgccgtagcaatggcgctcgtcagcagcctgaaggacatgcctgtttatgaggacgcgcttgcctttggagaaatcgggttagcgggtgaaatccggagcgtatcgcatgcggagcagaggatagcggaagcccagagactgggcttccggcgctgtgttttgccgtaccacaatttaaaatcaatcggctctgatttgaaagaaaaaatcgatttaatcggcgtgaaaaatatccgcgaggcttttgaagcgctcgcgggccggtaattctttttcctgcgcaatataatagacgcagcctttttccgcattgacattcgttacaaccgaagctttttccaagttgcaataaccgtctttttggtaaatacagtcacagtcgcacggtattaatgtcatacaatcatctccctcttcatagcgcctcaaaattaaagtttcgaggcaaacgcagcgttgaaaacgcaaaataacgcaatctcacatcgtttgtaaaagcatgccgcagctttttaagtaaagaattgctatctgtttttataatgaagaaacaaaggcaaaatatacacattgcgggaaagaaaattcattcataaaatcttcttctcatctaataataaaacggagataaggagatggtgagatgaagaaatatattgcgcttgcgattgctaccgtcataatgattgcgggtattcttttttcgggcagcgctgtcatgcagtccgtgccttttgtttccgtatataaagccgcgcctaccacaatagaagaaaccgttgtctgcactgggaaagtggagtattgtgaaagcagggaagcgcgcaccattaccggcggaaccgtttcaaaggtatatgtttctcgaggagataaagtaaaagccggagacaagctttgcgatatcgcgcttacctcttccaaaggcagcgaagaaacaaaaagcgcattgagcacacaggaaatctaccaggcggtgctaaacgggaattacagtgtgctcgacaactatgacggtctgctggaaaacgcaacgcagccagacggctttgcaaacggcgaatccatgacacaaacactcactgcgcccatctccggtacagtggaaaaagccgattgctcggaaaatgaatatctttccccaggggacagcgctttttccattgtttccgacggggacctccaggtcgtcctacctgtcagcgaggtgaaaatcagtgacataaaaattggccagcccgttaaaattaccggaagcggctttaaaaacagtacctatagcggtaaggtcacatcaattgacgatgaagcaaaacagacgactacaaccgccgggaaagaaacgactgtagacgtcactgttagcatagaaaaccccaaggatgacatcaagcccggttatacggcaaaatgctccattgtatcctctgtgaaatcgtctgcgctcgttctgccataccaatcggtcaaggcggatgaggacggcaaagaatatgtatatatatacaaaaatggagttgcagtaaaaaagtatattacaacggacggcgaatatccaaagggccttgaggttataaaaggaatagaggcaagcgactatattatcaccaatcccgacggcgtgcgaaacaaggctgccgtaaagcttaaccaacagagtaacgcttcagaaagcgcggtggaaggcaatgcttgatttgttgtccggcgcgcttaaaaacatttgcaggaaaaagggcaggagctttcttacgatgtccggaattgcaatcggcgtaacttccgttattattataagctgtatcagctcctgtggaacttccgctgtcaataacgagcttgacagcctggggctgggcggtcttactatcagcgcaaaggaaaactcagattcgccgctatccgacgacgagctccagacaatccgcagtgtgcccgatgtcaaggacgcgacgcctgtattaatacaaacgacccaggtatacagccagaatgaaaagcagagcgctttcgtatggggaatcgattctgatgcgggggataccgtttcgcttcagctcttatacggccgttttctgaataaatccgatatcggcagctgcgcgaaggtatgtatggtcgataaaacctttgcgcagtctatttatcagcgggataatattgttggcaagaacatctcagtccaatgcggcgccgtaatggaggaatataaggtaatcggcgtgataaagacaggaagcggcctgctgcaaaacgcaatgggaacctatctcccaaattttatttacgccccatataccacagtacgggaagcgaccggaacacagggctatcatcaaattataacccgtgcgagtgacgggtcggatttggacgcacttggaaaaagtattgtgcgaaaactgaatgatacctctggtttggacgacggatataccgcgaacaacctggcaaagcaaagggatatcctgctcaatattctcgatatcgtcaccttaatcctgacctgtgtgggcgcggtttccctgattgtggcgagcttaagtataatgacggtcatgcttgtatccgtaagcgagcgcacaagggaaattggaattaagaaatcaatcggtgcaaaaaaaacaacaattatgcttgagtttctttcagaagccggcttgatttctttgctcggctgtttagttggggttgtgttgggccttgcggtttcttttgccggtgcaggcatgtttcaaatgaccttgaatctaaacgcaggcgttttactgtttacgtgtgtattttccctgttgactggtgtcgtctttggcgtatatccggcaatgaaggccgctaatcttaaaccggtgacagccttgagaagtgaataaatatatttaatttttttgacttgtaactaaaaaggtgtaaattattatcatgcattttttatttgacgcgaaccttccgcagtcgcctgtactaacggttataatatcaggtgaatacccgcgttttatcaatagggtagaggagttgggaatccgtgcagttcaaacgaggccctgtttttcaatgccttttcctgagcgttatcacgcagatatgcaatgcctgtatttggggcgggagcagctcatagtcttaagggaatgccgtgcgctccaggataggcttagagaaagaggcattccttttattaaagcagtaaacaatatagccgccaacgaatatccatatcatgttttgctgaacagccttgttatgaagcggcatattttctgcaataaaaagtatgccgatccaaaaattttagaagtttgcgaaaaaaatagcatagagattatcacggtgcggcaagggtacgcacgatgctccgcagcagttatttcagaaaacgcgttggtaacggcagatgaatcaatttaccgctccgctgttaagctggggtacgatgttttaaagatacaagaaggccatattaagcttccgggcttttcacatggatttattggaggctgctgcgcattgctggaaagcggtcagctattttttacgggagatataacacagcatccggattatgatgtcattaaaaattttgcgcgaaatcacggcgtatatctaaattcgctggacaaatgtgaacttacggatattggcggcatggttttattaacggaaaaagaagaataactatgtttgtgactttatcggttataagaaaaatttgcagttatgtgttagctgctatataattattagaggtcaggaaagcaaactaaatttaacgtgaggtaaaattggcgttatctgatatagggaacacgcacaaaaaaacagagcgacatatacaaaattaatattttgtatatgtcaggggaggaattacagttttttctttccctgtatgagctgttttgttagataaaagccgattttacctcacgtcttaatttaccttgttgttttcctgacatccagatagttatatatcaactttcggacatctgcaaatacttcctgcacagcggcaagctttgcataatcgcaacggatggaaaacgaactgatacaaaaacaaaatataattttgttttataaaaagtgcgataatgaacagcacatgaaatttattgaagacaacgcatcatattactcaagcagcagattttccagttcattttcttttctgcgctccaaggattatatatcatatcgttcttccataaacacagaaacccaatcgtctaaatataaatccgcattatatcactttttaagagcgaaggccgcaaggcttcgccttttgtctttacaagcggttgttttttgagtataatagaaaacaaatgtatataacaatatgaggttataaaaatgtactttttaatttttattttagctattataataatacctgttattgtagttcaggcgaataaaagttcacaaaaaaagaaaagaccacctagctttacatatacaaattatcaagcaccacagccacaaaaacaaccacaaattaattttcaacctatgaataatggagtttatccatacagaaaaaataatttactgactactaatgaacgattattttatcaaaggttaaagccaataacagataaatataatttacatataattagtaaagtaagagttgcggacttggttcttccctttgaccatctagataaacgagattggcaattttatttcaacaagataaaatcaaaacatgtggactttgttttatgtgaccccttcaatttacagcctaaacttatcgttgaactaaacgatgcaagccatcaaagaacagatagaaaagaacgtgacctatttttaaataatgtattcgtaaaagctggaatcccaataatttatgtaatgaacacgaatgaaattgaaacacatatttgcagagaattaaatattaaaaaagagacgatacaaagttaaaagataaaaccgcaaagcccctgccctatttttctttaatttgcagtttttagattaataagctataattataaaaagtaaataaagaaaaagaggtaaaatcggctttatctaatacaaggaattccttacccataagagctgttttgttagataaaagccgatagatattcaattgaacgattatataaatgaagctccggcgcttctaaaggatttcctcggatatatgcagactgttaaaggaaaatctcccgcaacggtcgatgaatactactccgacctgcgtacctttttccggtatttaaaaaaaatgcgcaaacttgttcctggcgatatggatttgcaggagatttcaatttctgatattgatttggattttatcaaaagtattaccttgacggatatctatatctttatggactatgccatgcgcgagcgcggaaataacgcggccactcgagcacgtaaaacctctagcatacgttctttcttccattatttaaccaataagaaatgcctgctctccattaaccccgctgaagaactggaggttcccaaaaaaaagaaagcgctccctaagtttttaactctggagcaaagcctggagctattaaatgccgtagatggaaattataaagaacgggactactgcattattacattattcctaaactgcggtatccgcctttcagaactgacagggcttaactattccgatgtacacatagatgagcgcacaatgaaggtcaccggcaagggcaacaaggaacgcattatctacctgaacgacgcctgcatcgacgcgattaggcagtatttgaaggtacgccctgtcgatggtgtaatcgataaaaaagcgttgtttatcagccggcaaaaccggcggatgagccccaaaaccgtgcaggcgatggtatataaatatctggaaaaaatagggctggattccaacggctactccgtacataagctgcgccacacagcggctacgctaatgtatcagcatggtaatgtggatatcagggtgctgaaagaaattttaggccatgaaaatttaggtacaacggaaatttatacccatctgaccagcagccacatggagcgcgcggcaaacgcaagccctctcgcccatgtcaagcccaaaaccaaaaaagacagcggcaacaacggcaagaattgataatttcccgttaaaaagcgctataaatcaaaacggaactttggttaaaaggttgaccaaggttccgttttttaattcaattaaatatcatttaaatatcatttctcaaaaggtcttcatagctttcgcgttttacaatcagccgcgcttttccgtccttaaccattacaatgggaggcttctggattctgttataatttgacgccatagagtagttataagcgcctgttgaaagcaccgccaggatatccccaggctgcgctttggcaatcgtcgtgttttcctgaattaaatcgccgctttcacagcattttcccgcaattgtgacaactgcgtctgcgggcttgtccgccttgtttgctgtaattaccgtatattccgactgataaagtgcatagcggatgttgtcgcacatacctccatcgacagaaacatacgttcgaatgtttggtatttcttttactccgccaaccgtatacaatgtaatcccggcttcaccgacgatagaacgccccggctcgatataaataaacggaacgggaatcgcgtgttccttcgcttttgcttttaccgcctgggatacggccatcatataattgtcgtaggccgtgggcgtatccttttgcgtatactgaattccaaaaccaccgcccagattgagctgagtaacggcatggccagtctggaccttaatatcgctgataaaatccatcatgatttccgcagccgtaacaaacggctcaatatcgaagatttgtgaaccgatatggcagtgcagttcggtaagctccacattttcatatgcaagcgcccgtttgaccgcagacattgcctcgcctgtttcgagcgcaaacccaaatttggaatcgatttgcccggtacggataaaatcatgcgtatgggcgtctacgcccggcttgatacgcatagaaattttctgcaccttccccatctggcgggccatatcattgagccggtcaagctcatagagattatcgacgacaattttcccgacgccaagctccagcgccatgctgagctcttcatttgtcttattatttccgtggaaatgtacattttccatttggaaacccgctttgctagcggtatacaattcgccgccagatacgacgtcgagacccatattttcttcctttataatccggcaaagctccaggcagctcaaagccttgcttgcgtagagagccattccttttgcgtcataatggtttttgaaggactttacataggagcggcaggtgtctctgacggttgtttcatcaataacataaaccggcgtgccgtattccttcgctagcgcaaccgtatcgcagccgccaattgtcaaatgccctttttcatttacctgcaggcaattgtttacaaacatctttcccattcctttcaaaatcagcctttattcgccggaatttggtgattcctgctttttctgatatttttcgacctgttcttcgatatattgctgtatttcttctttcccatccccgtttaatgcggaaaaagggaaaagcataatatcaggataaccggccagctcggttttaagcgcctcttccctgttttttaattccgttttattgagcttatccttttttgtcagtacgacgataaagggaaagccgttcgtataaaggaattcaatcatatgcatatcgtcttttgtaggcggatggcgcaaatcgacaatctgaacgaccgtgcagaattgcctgtcctgcgcaaaatacccttctacaagctctgcccagcgccttttctcggcttgggaaacctttgcgtagccgtagcccggcaaatccaccaaacggaaatcaccggcatgaaaaaaattaatggtgccggtttttcccggcgttgcgctcacacgcgcaagcgccttacggttcacaagcttgttaatcaaagatgattttcctacattcgacctgccggaaaaaacaatttccggcatagtggaaggcggcagctgttttgcggtgcctgccgcggtttcaaattgggcggtattgaaattcatctatcgcccctccgttctgttagattattgcggaatcctattcattaccgtaccgagtgttttagtcttaggcaggattggttcttttttttcttcgtctgagggctctgccggaaccaatgcgcaggagagcgcttcccggaaatccccgaccggtacaaatcgcaatgcgtgctttacggtctcgtcgatttctgccaaatccggttcattctctttcggaataataacagtattgacgccaagccggtaggctgccatcgatttttcctttaacccgccaattggaagaatccgcccgcgcagggtaatttccccggtcattgccacatcgcttcgtacgggcgtatttgtcaaggcggatacaagcgctgtcgccatggtaacacccgcggacgggccgtcctttggtacggctccctcgggcgcatggatgtgtatgtcatattttttgtagaaatcgtcttcaatatgcagctgcgaagcatggcttcggacacaggtgacggcagtcttggcagactccttcatgacgtctccgagcgaaccggtcagctcaatctttccgctgccgttaaccaccgcaacctcaatgggaagtgtctccccgcctaccgaggtccaggccagtccgtttgctacgccgacttcgtcaattttgcttaacacgtctgttttgaatttcctgggcccaagcaggttttccaaatcgtccttgccaatatttacgcgctttgcttccccattgacaatcttcaccgccgcttttctgagcaggtcggtcatccttctttccaggcttcttacgcccgcttccctggtatagctgtcaatcaggtcataaatcgcgtcgtctgacaggcggaacgtccggccgttcaatccgcagtttttcatctgctttggcagcaaatgcttctttgcaatttgaaacttttcttcccgtgtgtagctagcaagctccatcacgtccatcctgtcgagcaggggtgccggaatcgcgcccatgtcgtttgccgttgtgataaacatgacattgctcaaatcgaacggcaaatcgatgtaatggtcgtggaaagtgctgttctgctcagagtcaagcacctcaagcagcgcggaggttgggtcgcctttatagtcgttccccagtttatctacctcgtccagtaccaggaccgggttgttcgtaccggcaagcttgatggcgttcatgacacgcccgggcatcgagcctacatacgtgcgcctgtgtccccttatttcagattcgtcgtgtacgccgcccagcgaaatgcgcgctgatttccggttgattgctccggcaatcgactgggcgatcgatgttttgccgacacccggcgggcctaccaggcagagaatctgcccctttacatcgggagacagctttcgcaccgctagaagctctaaaatgtgttccttgaccttgtcgaggccaaaatggtttttatcgagatgcgcttttgccttttttatatcaatacgttcctggcttgaaatattccacggcaattcaaggcaggtgtcgagataggttcggataacgtttgcttcctgcgagccgaagggcattttctggagcttatcgcattccttgaggagaaccttctggatatcctcaccaagcttcagcgcaagtacctttcccttatattcttcggcctcaacggcggggtcgtcttcgtccccgagctcttcttcaatagcgcgcatctgctcacgcaggtagtattccctctgcccttcatcaatgcgctcccgcgctttctggctgatggtttcttctatttcgaggataaacacctcgttggtgatgtattcaattaaacattccagacgcttcctgctgtcaagtgtttcgaggattttctgcttgtcctggtaatcaagtataatattgcctgcaataaaatcagcaagagttccagcgtcgttgcacatgccgaccttataaaggatgtcggccgccatttttggggaaagcctgacatactgctcgaaaatactctttgcagaacgtatcagcgccaaaccagccacattcggttctttttcatcactgtatatcttctcaacctccgccgtaaaaaaaggccggtccttaatatagctgtataccgacgccctgcaaatgccctctacaacgacgcggataacattttccggctgcttgagcacctggatgacacgcgcgattacgcctacgcggtacaggtcgttttcctttgggtcggttatattgatatctttctgagaagtaataaaaatggtttggttggtgcgcattgcctggtctatggcaagcgcagacttctttcttcctatatcaaaatgaagcatcatttccggaaacaatacaagcccgcgaagcggaagtaccggaagaatgacatttctttcttcctgttctatgttcatataccttcatcctccttaaataggcggtaaatacataaagagctgtaacctgacgaaaagtaagttacagctccgcaaaacaatttatgacgcagtattatttttcttgggtttcttcttttcttcgtcatgttgagtgacgctcatttcgagcggctttctctgctggttatgaatgacattgacattcgaggggtccttgatggttgcttttgtgataacaaccttttcaatcgtcgggtctgacggtattttaaacatcaaatcgcgaagggagctctcaaggatagagcgcagtcccctggcccctgtcttctcttcaatggccttattggcaatcgcctcaaaagcggattggtcgaattcaagaatgacgttatcgagcgcaaacagcttctggtactgcttgacgagcgcgtttttaggttcggtcaggattctgacgaacgcatccttatcaagcccgttgagcgctgtaatgacaggcagcctgccgactagctctggaatcagaccaaatttaacaaggtcatgcgaaacaacatcgctcatccagtcggtcgtattgagttctttctttgccttgacctgcgctccaaaaccgagcgatgaggaacccgtcctcttttcgacgattttctccaggccgtcgaaagcgccgccgcagacgaacaggatattttttgtgtcaatctgcaaaaattcctgctggggatgctttcttcctccctgtgggggaacatttgaaacagtaccctccaggattttgagcagtgcctgctgtacgccttcgccgctgacatcccttgttatcgaagggttttcagattttcttgcaattttgtcaatttcatcgacataaatgataccgcgttccgctttctcaatatcaaaatccgccgcttgaatcagcctgagcaggatgttttcgacatcctcgccgacgtagcccgcttcagtaagcgtagtagcgtctgcaattgcaaacggaacgtccaaaattttagcaagcgtctgggcaagcagggttttgcctgtaccggtcggtccgagcaaaagcacgttgcttttgacaaagtcaacatcgtcgtcctggttgttgatgcgcttataatggttataaacggcaacgctcaaggtgaccttcgcttcgtcctggccgatgacatattcatccagctttgccttgatttcctccggcttgaggagattctggaaatcaggctcacgctccttcttttccttcttctcttcttcgccgtcgtggagaatcgacaggcacagctcgacgcactcgtcacagatatacacgccgttgcccgcaatcatgcggccgacgagctcctgcggcttgccacagaaggagcaatggatctcccgtgttgtattatcgtccctgtttgccataaaactctaactcctatcgttatcgtttcgtaatgaccttgtcaatcaggccgtatttcatggcctcgtccgcggacatgaaattgtcgcgctcggtgtctctttcaataatttcgagaggctggcccgtgttatcggcaaggatttggttcaatttcttctttgttttctggagatggtcggcgtggattaaaatatcggtcgcctgtccctgtgcgccgccgctgggctggtgaatcataatatcgctgtttggcagcgccaaacgcttgccctttgttcccgccgcgagcaggaacgcgcccatacttgcggccatgcccatacagatggtggaaacgtcgcacttgatatactgcattgtgtcgtatatggagaagccgtccgttacggaaccgcccgggctgttgatataaaggctgatgtcctttgtgggatcctggccttcaaggaataaaagctgcgcgacaacgaggctcgcggtcgtattgttgacttcttctgtcagcatgatgattctgtcgttgagcaggcgggagtaaatgtcgtaagaacgctctcccctgctggtttgttcaattacataaggtaccaaactcatgaagtatcatccctttaattaaattggttatgcttgtataagcataggcaggaaattacaaggttattcaggctttcggccatttaagaaacctttgcgctgtccttgacaaggttcatcgctttttctaccgcaatatccttcgcaaggttttccgccgcaatcaggtttttaattttttcgacgtccatcttatagctttccgcaagccttgcgtactcagcttcgatttcctcgtcgttcgcggtgaggttctcaagctgcgcaatcttctcaagcgcaagcctcagcttcacgcgctgctccgcctgggtcctgtacgctgcgcgcaagccggactggtccatgcccatatactgcatataggtcgccatgtccatgccctgggagcgcaggcgcatatcgaattccctaatcatatcgtcaatgacgttctcatacatcgcctcagggatttcggcttcaagcatatcgcataccttcgtgaaaatctggttttcaaggtcggtgtccgattcctgctgcaggcgcttcgcaacctcttccttaagctcttccttatactcgccgacggtttccttttcgctgacgtccttgacgaattcatcgtcgaattcaggcagctcgcgggacttgatttcatgcaggacaatcttaaattccgcttcttttcccttcagctcgtcaacctggtaatcgtcgggaaaattgaccttaatggaaaattcatcgtttgttttatggccgataatctgctcctcgaagccgggaataaagctcttgctgccgagtgtgagattataattttccgccttgccgccctcgaacgcttcgccgtcgacaaagccctcgaagtcgattaccgtgatatcgccgtcctgcgcggccctgtcctcaacagtaaccatcctggagttacgctcacgcactttattgatttcttcctccagcacctcgtctgtaacgtctgtcggcttcttcgtcacctcgatgcctttgtaatccttgatttcaacctccggctcaactgtaacgaccgccttgaaggtaaagccgtcttttccgacgcttgtgacgtcgagatcgattttatcgttaacgagcttaagctgtgcttccttcgccgcgtcggaaagcgcgcccggataaagctcctgcattgcgtcctcatagaaaatagcctcgccgtaaagcttctcgataatgtgcctgggcgccttgcctttacggaaacccggaaccgtcatattcttactctttttacgatataccgccgcgactgctttttcgaaggtttctccgtccacctgtacctcaagctcatagcggtttgtctctaccttgtttgatgctttcagactcattctctttgtcctcctgatttttagcaagtattcaaagcctattgtaacatataaaaaattctttttccatacccttggtgcaaattattgaataataatattaccggattaaatacggtataaaatccaagccgtcgcaggccaccagcttaaagtcgattccgtcatatatcccgtttacagcacgctttgcggcatccccgtggatatgcccgtaaaaacatcttttgacattgcgctgcttcaaaacggagaggatttcttcacagcacgccccggcatgaacgggagggtaatgcagaaacaccagcggctccaggccggttttttccgctgcgtccagcgacatattgaggcgcccgatttctctggtgagcacttttttgtccgcatcgtcctccgcgtcgtaaaaccagccgcgcgttccgcagactgcgtaattttcaacggcagccgcgctgttgaaaaccagggagatggaatcaaagccgctttcgcttaggtaacgctcaacctttgtctttgtcccccaccagtaatcgtgattgcccttgagaaatagctttttgccgggaaggctttgtataaaagaaaaatcggcataggtttcctcaagcttcatcgcccacgaaatatctcccgggattacgaccgtatcctgctgcgtaacaatggcgcgccagtttttttcaaggcgttcgacataatccgcccagccgctgaacatatccatcggcttgtttgtcccgagcgacaggtgcaaatcggcaattgcaaagagcgacataattaaataccaagcgtgcgcagcacatactgcggcatttcgtccgccgtgcagacattttgaaagcgaacctccttgcccttaagggaagcaagcggctttggaacctctttgtgtgtcgtccgggaaagctcgtcgaccatttcaaactcatcctccggcaaaaccttgtcctgcgcgatggcctcgagcacgctgcgcgagaacttataggggcttgccgtggaagcaattatcgcgggggtttccttgtcgcctgttttcgcgatatattggccgtaaacattgaccgcgaccgccgtgtgcgtatcgcagaggtatccggtgctgcggtaaaggctgtcgatggttttccttgtcgcgttgtcgtcgcagcagccgccgaagaaaaggcctgctatctgcatcataacggatgcatcgacggaatattttccgtctgttttaagctttgccatccattccttgattttcacgtcgtccccgccggaaaggtggtatagcaggcgctccaggttgctggaaacgagaatatccatcgacggggaaaccgtcgtataaaatcttctgtctttattatacacacctgttttgatgaaatctgtcaggacgttgtttgaattggacgcgcagataaatttatgcacgggcagccccatacgcatggcgtaataagaggcaagtatattgccaaagtttcccgtggggaccacaatattgattttttcaccgagtttcgcacggcctttgtttattaaatcgcaataggcggagaaatagtatacgatttgcggcagcagccttccccagttgatggagttcgcgcttgaaaacagcatatcgttttggctcagcttctcgagcatttccctggttgtaaaaattttctttaccccggtctgcgcgtcgtcgaaatttccttctattgcgcacacattcacattgccgccgggctgcgtgtccatctggtgcttttgcatggggcttacgccgttttgcgggtagaaaacgataatctgcgtgccgtccacgtccttaaagccttcaagggccgccttgcccgtgtctcccgaggttgcgacaagaattaccgcctttttccccttgcacgtcttttcgagggattttgtcaaaagatggggcaaaatctggagcgccatatccttaaacgcgcaggttgggccgtgccacagctccagcatgttgaattttgcctcgccctgttccaggtatacaagcggcgccggattatcggaaccgaatttttcttttgtgtacgccttttccacgcaccagtcgacttcctctgccgtaaagccggaaagataatccctgagaattttcttagccctgccccggtaatccattttgagcaggtccttcatatccttttcgctgtacttcggtatttcgctggggacaaacagtccgccgtcctcagaaatgccctgcgcgattgcctgggctgccgaaacgcggaggttcttgtcggttgtgctgttgtacatcatgtgaatgaccattcctttccaaaaggcgtaatctgaacataaggaaaatacaggtgttttcctactatttaaaaaactcccactagtcttttattctattacaaatcatccataatgtcaaagctttcaaagaaattgcaggcgttgccgaagaatatcttttgaagctgattttctttgtaattttgcctcaaaaaactttcataaagaggcccgattcctgtaatatcgtccattccgtccggcatatcggtcccgtcgaaatcgctgccgatacagacggtatcctctcctccgagagaaagaaaatgctccgcatgcctcaggatatcgtccgtagttgctttctcatcgccccgcaggaagcttcttgagaaattgaggccgacgattcccccgcagttttttatgataagaaattgttcgtccgtcaaattgcgcgggtgcccgcaaacggcgcgcgcattggaatggctggcggcaagcggcttttttgcgtattgcgccgcgtcgtaaaaaagcgcgtcgctggcgtgggaaacgtcgtttataatcccataacgctcgttttctgatattacggccctgccgaacggcgtaattccggggttttctttcacgaacgcgcctccgccaagctcgtttctcccgttccaggtaagcgtcatcatcttaacacccaggccggcaagcttttttacgttttcaagctttccgccgatcgccgcgccgccttccacggtgagaataacgctccggaggcccaaacggcgtaccttttcaaggtcttttttacagcctgccttgattacttcatatggatttcctttgagcattccatcaagccttccagcgcattgctctacaaaatcgaacgctgcctgcccgcgcacgttatcgggaatccagacagccatacactgtacccatggggaatatcggctccccttttgaaacgacacatgcatatcgttctcgacaaggtccttttcctttgtcaccgcctcataaagcgaatcgcagtgcaaatcaaaatactgcatagtcttcctcctgccaaaaagcgttttctatataccggatacccgccggctttaaggtccgcggctcgaaaaaaacttccgctacatcgaaccgcggctgtaagcctgtttgagattcctggagataaattgccgccgtccgtataatttttaattgctttgcttttgttaccgcatccgccggggcggaaaaggagcccatcttacgtgttttgacctcgataaaggcaagaattccgtccttatgggcaatcaaatcgatttccccgcatcttttgcaataatttcgctcttttattatatagccgcgcccgcccaggtattccgcggtatagtcctcacccagcctgccggctgcttttgtatccgccataaaatcagcccagtatctttgtaaggaacgacggcctgtggataggcgacggcccgtattcccgcagcatttcaatatggtgtttcgtaccgtagcccttatgcttttcaaagccgtactgcggatagtcctccgcaagctcgagcatcagccggtcacggctgacctttgcgagaatagaggccgcggcaattgaattggaaagcgcgtcgccctttacaaccgcgcgcgccggcactttgaccggcggcgttttattgccgtctatcagcgcaaagtccgctgggatatgaaggccctccaccgcgcgtttcatcgcaagcatcgccgcgtttaaaatgtttatcgactcaatctcatcgaccgaagcccatgcgacgcaataagaaaccgcccggccgcagatttcatcaaaaagcgcttcccgctttttttcactgagtttctttgaatcgtttacgccgtctatcagcgtcccctcaggaaacagcacggctgccgcgcacacaggcccggcaagcgggccccttccggcctcatcgacgccgcagacagcgcggtatccttgcgcataggtttccttttcatatgtaagccaatccataacctaaccccattccttatataatgcaaagggtttgaaacgattgttccgcttcaaaccccagtatgcgcttttatctgattccgccgccgattatagcaagcgcctggtcataatccttccggcgcacataaaagatatattcgcaggacaaatccatgctttcgccggaatcgtccgtacccgaataagaaccccttccggctataccggggcttatacggctatgcgtttttaaaaaataattgattttattattttggagcgcttcccggattagcgcctgctccctgatggaaaaggcagagataagctccgtgcggttaaaaatagtaatcattgccgcttccccttttttctgtaagctcacctggattgctacagttaccctgccggagcgccttccagtgtgattttcccaagctttgctccgcggtactcgtcaagcagcatattggaagcacgaagcgtgtcgatttccccgccggagataagcatgccgcgtttccgtccgataagctccagcagctcataaggcggcagcgccgcaatatcgctttccgtgagcttgaaccttgtgaggaaagcctcggtagggcgttccttcagcacctcgagcagccggacggcaagcagctctgtatcaataatctggtccttgacggcgcctgtaaaggcaagcctttccccaaccgcgggatcgtcaaatttcggccagagcacgcccggcgtatcaagcagctcaaagccgtttccaatggtataccattggttgccgcgcgtaacgcccgggcggtcctctgcctttgccctgcttttgtttgcaactttattgataaaggaagatttcccaacgttcggtattccaacgaccattacccggatggtgcggtttttcattcccttttcttcccaggatttaatcctgtcgcataaaagctcacgtaccgccggcataaaaccggaaatccctttgcccgatttgcagtctacggcaattgcgccaattcccttgcttttaaaatatgaaatccagcgagccgtttccctgctgtccgccatatcgcatttattgagcaggataaggcgcggcttgctgccgagcaggccgtcgaggtcggggttgcggctgctttgcggtacgcgcgcgtcgatgatttccgcgacggcgtctaccagcttcaggctctcctgaattttgcgtttcgtcttcgtcatatggccggggaaccattggatattctgcatttccgccatttatattacctccttaaaaggatggaaacaaacaagggacgcacatggtgcgcccgcgtttttagtaaagatatttcacatggtcaaaggggaaaacgacagcctgtgctttgccgatgacatccgatatatgaatcagtcctacatcgctgtcgcggctgtccttggaaatcaggcggttatctcccatgacaaagatttttccttccggtacggttgacggaaagtcccagttaataccgccgagcgtcttgtccttgatataaggctcattgagcagtacgccgtctaccaaaacatcgccagtctgtgcgttgatttcaattttctggccttctaccgcgatgacgcgcttaatcagcggcttatcgatattctccccatggcttacggcgataatatcgcccggcttgggcttataaagcaggctggttacaattaccttgtcctgattttgcagcgtgtccatcatagacgggccgtcaacatcgaccatacgtagcaggaatatgatgataagcggcgccaggcacacggcaaacagcaccggttttatccactcaaagcatacggcagtcagtttattcttcatgcgttacttcccctatcaactaagagatttaaagttgctaaacgggaagacgacagcctgtgccttgccgatgatgtcgtccttatgaatcaggccgacgcgctgggaacggctgtccagtgaattgttgcggttgtctcccatcacgaatatcatgccttccggaacgacatcgggaacggggttgtcgaaaacagctttatattccattacttcgtagatataaggctcatttaaaataacgccgtcaacaataacctgccccttatcataatcgattttaatagactggccctcagttgcgattacacgtttgataatcgggtctttatattcctgcccgtggctaatcacgacgacgtcgccggcctttggctcgtaaagcaaactggtgacgaacaccttgtcgtggtcatgcagcgtctcgaacattgacaagccgtccacatcaaccaggcggaacacgaaggtgagcaaaagcacaacgattacgacagcggatatgatagcctgaagccactcaaaacagctctgtaaaccgccgccctcgccgtcatcatcgctatttggcccttccgcggccaaagcggccgctgggacaggcgcttcaggcgcttccaacacaatattttccgggttcggcggtgtgtttttatattcctcatcgtttaaaatggtgaactcaaattcttcctttttactcatatgggtacctccgtgtttttgcatatagcaaaaaagggacggcaacgtccctttatccgttcgatattaccggatttgctccttaacctttgcagccttaccgactctgtcacgcagataatagagcttgctcctgcgaaccttaccgtgtctgacgacctgtacgtccttgacgttcggggaatggaccgggaaaaccctttccacgcctacgccgtaggaaacgcgccttacggtaaatgttgccgcgacaccgctgccttttttggcaataacagtgccctcgaacatctggattctttctctttcgccttcacgaatattgacgctgacccttacggtgtcgccaatctcgaacttcggcagctcattcttcaaagaatccgccgcgattgttttcagtgcatccatttagatagcctcctaaaatttcagacattcataacctaaccggccagaggactgtccgcttcaatgtctcggtaaaataccgggccgttgaaccccatcgagtaaacgacggatttcaaatgctttaatattataacatgatatggaataagttgcaagaattttttacgaaaaacctgcttcttttctgagcttttcaagaaacgcggtaaagtacggcggcaaatcgcttgtgaattccagatattttccggtgacgggatggataaacccgattttgcgcgcgtgcaggcattgccccgctagcccttttaccgcttttttggggccgtaaacctcgtcccctgccacgggatggccgagatacgccatatgcacgcggatttgatgcgtcctgcccgtttcaagccgtacagcaaggtgtgtaaacgaaccgaagcgttccagcacctgataatgtgaaacggcattcctggaatggttttgcgtgaccgccatctttttgcggtctgaggggtgcctgccgagcggcgcgtctaccgtgccctcgtccgttttcatgttgccatgcacaaccgtttcatattcccgcgtaaagctgtgttccttgatttgccctgcaagcccatgatgggcgcggtcgctctttgcgataatcagcaggccgctcgtgtccttgtcgatacggtgcacgataccgggacgcacgacgccgccgatgcctgacagtgagccgccgcagtggtaaagcagcgcgtttacgagcgtgtggctgtaattccccgccgctggatggacaaccatgcccttgggtttattgaccacgagcaggtcgccgtcctcatagacgatatcgagcgggatatcctcaggctccgccgaaagcgaaacaggcgcggggatttcgaccgtaatgctgtcgccagccttgagcttatagtttttgccctgtaccgccccgtttacaagtacacgcccatccccgcacagctttgcaagaaagctgcgcgttttatcgggaagctgctctgagagatacttatccatacgcttgccttcatcttcaggcagagcgtaaagcgcctgcttactcatgctcctgcgccttctgccccagctcttccttgtcgtgcctggttttaaagaaatccgacacgaagaaaaggtaaatcacaagcaggaccgtgccgaatgtaatacagtagtcagcaaaattgcatacgggcgggaaaaaggacagctgtatataatcgaccacatagcctaaaaaaatccggtcaatcaggttgcctaccccgccgccgataacaagcgccagcgatacaaaaaacagcttgctcctgttttttgcgcggaacaggacaacaatcaatacaaccatgacaatcgctgtcagcgtaatgaaaatccagcgctggttttcaagcatgccaaaagccgcgcccttgttttccacatagacgaagcgcagcagcgggtcgagtaccgtcacaggaccgccaatttttatggtattgacgaccagaagcttcaaaagctggtcgatgagcaccaaaagggcggcgccaacaatcgcaagtaccggcaaacaaatcactcctatacgaaaagcggcgtatctctatacgggacacgccgccgcaattttttattttcctaatacggacgcacagcgtttacaaatggtcggatgctcgtgattttgcccgaccgtttcgctgtaacaccagcagcgctcgcacttgtcgccggcagctttggaaatcgtaacagaaagctcgccgccttcagcttttaccacttcaatgccggaaacgataaacgccgtctttagctcgtcttccacagatttgatgaaatcgaacaattcgccagcgcaggaaagcgtaaccttcgcctcaagggaagcgcggatttgtttttccttcaccgcctcttcgagcgattttttgacaacgtcgcgcagctcgtggattctgtcccacttttccatgaacccgtcgtcaagcccgagctccagaagcttgggcatttcgttataaagcacgtggcgcgggtcgttttccctgctatgcggcatgtatttccagatttcgtcggaagtgtacgcgagaaccggggcaatcatcctggtcatcgcgtccaaaataatataaattgccgtctgcgcggcgcggcgcggtttaccgtccgcgttttccgtgtagagcctgtctttaagcacatcgagatagaaattagacatatccacgacgcagaaattatgaatcccgtggtaaacctggtggaactcaaacgcatcgtatgccgcgcggacccttttattcagctcgtcgagctttgcaagcgcccatttgtctatcgggaacagctcatcgggcgaaagcatatcggtgtcgggattaaaatcgcttaagttcccgaggatgtaccgcgcggtatttctgattttgcgataggattcggaaagctgctttaaaatatccttggaaatgcggatatccgcatgatagtcggaggacgcaacccacaggcgcaggacgtccgcgccgtactggctgatgatgtcctgcggctcgatgccgtttccaagcgacttggacatctttcttccatcgccgtccacgacccagccgtgtgtaagcaccgcctcgtagggggcgcgccccgtcgttgccacggaggtcaaaagcgaggactggaaccatcccctgtactggtcggcgccctcgaggtagaggtctgccggccatttgaggtagggcctttcctgtaacaccgccgcatgggtcgagccggagtcgaaccaaacgtccatgatatctttttctttgtcgaattcatgcgcgccgcactttttacaggcggttcccgccggcaggatttcagccgcgctctttgtaaaccatgcgtcgctgccttccttgcggaacagctccgcgaccgcgagcatcgcgtctttatcaatcagcggctcgccgcattccttacagaagaaaatagggattggaacgccccatttgcgctggcgtgaaatacaccagtccttgcgctcgcgcaccatggaggtaatcctgtcctgtccccatccgggaatccactgcacctggttgatggcctcgacagcctcatccttgaagtcgtctacggagcagaaccactggtctgtcgcgcggaacaagacggggtttttgcagcgccagcagtgcgggtactggtggttgatttttttcatggcaaagagagcgccggtgctttcaagatgctttgctatcggcttgtttgcgtccccggtcaaaaggccctcaaactgtccggcttgtgcggtaagcctgccgtccgcatcaaccggaacaataacgggaagctccttgtaattacggcatacgtcaaaatcctctacgccgtggccgggcgccgtatggacgcagccggtgccgctttcgagcgtaacatggtcgcccacgatgacaagcgacgtacggtcgaggaacgggtgctgtgttttcatatattcaagctctgagcccttaagtgtacccacaacctcataatctgtaatgccggcggcttccatggcgtccttgtaaagctcctgcgccatgacataatacgcttcgccgcttttaaccaggcagtagtcaaaggacggcccgacgcagattgccacattgcctggcagcgtccatgtcgtcgtcgtccagatgacgaaggaaaccttcgacgggtcgacgcccattgcggagaattttccgaggtcgtccgtcacgccgaatttcacatagatggaatagcatgggtcgtcggaatattcgatttccgcctcggcgagcgccgttttgcagtcggggcaccagtaaaccggcttgagtcccttatagatatagcccttgcaggccatctcggcgaagacttcaatctgctttgcctcaaattccttaacgagcgtaatatagggattatcccattcgccgatgacgcccagacgcttaaactgcgtacgctgctcgtcaagataggaaagcgcaaattcacggcagattttacggagttccacgtcggaaatggtggaagaattttcaacgcccgcttttttgcgcgccttgagctccgtaggaagtccgtgtgtgtcccagccgggtacatagggggatttgaagcccgccatattcttataacggacgatgatatccttcaaaaccttattgagcgccgtaccaagatgaatgctgccgtttgcgtacggagggccgtcgtggagcacatagaggggcttgccttcgtttttctccatcagtttttcgtatatcttctcttcctcccaatttttgagcgtttcaggctcgcttttcgggagccccgcgcgcatggggaattcggtcttgggaagattgagcgttgcattataatcctgtggcatttgactagttctctccctttgtaaaattgccggtatcaatccaaataccaatccagcccagagacacgccccgcgcctgaattggtatttcgacgtcaaacgattcaattattgatttcagctgtctcataaagcgtacagcatatattactttattatttcttgccggttacgctgtaattctcaccgaacttcaggtcgctgaatttattttctttctcttccccgtctttagcaggctccttcgcggtctctgccgcgggagctgtagtctgggacgaaatgtccacaacctcttcctcctgggcgggcgccgcttcctgctttggctgttcttccttagcgggggcgtaaaccgcgtcgctcgtcgggtagtcgcggtcgagctgtgccttcttgttgccgatttcttttgccgtcggcaaatcctccagcatcctgatatggctgttgtaggtttcaagcagctgctcgcgcagaaccacagcgtcggcctgaagctttaggtagtcgtttttctgcttgacgacggacgcgttcgcgccgacgacgatatcctgtgccttaagctgtgctttcttaatgatttcctccgccttcgcgttcgcttccttcacggtggaatccatcatcttttgtgcgtttaaaagggcgccccgtacgttttcctcatccttacggtattcctcaatgcgctttgcaagaatatcgagctttttcaccaggtcgattttgtcccttttatactgttcgagcgtctcagccacttcttccttgaatgcttccacatcctcaggacggcagccgccgagatttgcctttctgaatgttacgctccttacttcttcagctgtcagcatagtaatatctctcctatctgtattgtttaataaccagtctgactcttccctttttggtcagcccatcgctttgaccaattacgaattttccttttccccggataacaagcttgtcatccgtttttaacaccatacttacgctgtccttcacctgatgattcacagaaaccatccccgacgcgataagcttcacgcttttttccctgctgatatgtaaaacagccgccactacggcgtcaagccgcaaggaagcaagcgtacatgttatttcctccggaggccttcccccggggagcgggccgtctgtacccgcctttatttttacaccgacgcggccgattttatcgacctgcgtacaaatgtaatcagctaattccgcctttatgaaaacgacgcttccgccttcgccgacaaggatatcgccgactgcctcacgcttgatgcccgttcccatcaatactcccaaaaaatccctgtggctaagattataagccgaaggataagaaaacgcaaggggaattatagggaaagaagcggcgtccggctccatataatcgggaaaagcgccgaacatgcagcgctctccatcctcatatccggcaaaaaacagataatttgtaaaacgcagccgctttgccgccgcgagcgccgccggctgttcctccggcgtaagaaagcttgtgtaaaacgggtactgcttgtcacagcattgggtaatacaatcctcaactcttgcggcaagccatttttcttcgtcttttccagataagcccatttcttagaaatatacgccgttgttttcaagctcgtcgagcaggtcgtcgcccgtcaggtcgacgttgttcgggataatgataaacgtactcgtcgcaattcttttgattttgcccttgttggcatacgcgcagccgctcaaaaaatcgataatgcggcgggacatatccctgtttgtattttccaggtttaaaaccacggtatgcattttaatcagctcgtccgcgatagccctcgtttcttcgccgaagcgttccggcttgaagagaacgacctggagctttgcggtcgcgtttatatttacaaccttgttgcgcctgggcgcggaagtgctttctctctggtaagaataatccgacgatgatgatgagctgctgcctgacgcgttaaaatcctcttcgctctcttcttcgtaggcgtactcgtcgtactcatcgtactcgtcgtccggtgcgtcccacatccgtttaaacttatccactaaacctgccatttttaacaatacctccaattttatctgataagtcgggggccaaacagggaggaaccaatcctcaccatattcgctccttccagaatcgcttcatagtagtcggaagacatacccatggacagggtatccatagatacattatccatttttttgtccttaatgtcaataaacagtttgcgcatacgggaaaaatatttacgaatttcgctttttgtgtcgcaaatgggcggaattgccatcaatccgcggatagaaattccctctatttccctgatttgggaaataagctcttcaagcccctccgggagaacgccggatttgttttcttccccgccgatattgacctccaggaggatgtcggtcacaatgcctttcatgacggactgccgcccgatttccgaagcaagcttcacgctgtctacggattgtatcatatcgacctttccgacgatttgccgtaccttgttcgactgcaaatgcccgataaattgcagcgaagcgttttcaaggtcgtattccccgtatttggacaggagctcctgcaccctgttttcgccaatatagcgcagcccgagcgaaatcgcgtaattgatagccgccgcgtctaccgttttggtcgccgcaaggaaggtgatgtcttccctgttccgcccgctttcctgcgctgcctttgcaatgctttcttctatcagccggtaatttgaggcgatatcctgcagccttttttgattaaagcttgacgacctttccgtcatataaatcggctccttccgttacgattttatcatacatttcaatcgtcgtgccgttaaagagcacgccgtcctcaggctgcgggtcacacaggatgaaatcttcccctgcgaaaagtatggaaacctgtttaaatttcagctggtttccctgcacgacatatacgccctggacctttttcttttcgcttttggtcgtgccgtcctcgttttcaattgccttttctacgtagtcgtcgtgcagcgcgctcttttggatgcgcaggcccttataggtcttgaggtcgattttgaccgtctcattgcgcaggcttgcaattcccgggctcatatagttgcattccaaaatcagcgccgcgtcggcatttttatccttctggttgaccgctgcgatttttacgggtacgcttccggtcgtcgcatacggcatgttaacctgcacattgctgtaggatgtgctgagctcgagcgtttcgtccgcggaaacggggcaggcaatataccagttgaggtcgctgataaccttgcctattacgttgcccgcggccgctttcggcttttccttgagcattttgtttaccgtatcaaggctcatcgacgcggcgttcttataggcgaacgcgccttcatacccgtctgtatagctgacaaagtagccggcgacaggagaagtaacggtcgccaccgcttcgccgcaggattttgcgatttcatccctttgcttttcaagcgtttcaatccgtttgttgtaatttacgacctctcccgttacaatcatgcgctcgtttatcagatataaaaggtcttccctgttcgattttaaattataaaaatcgcccctgttgacgttgcgcaacatatcggtaattttctgggtaagctgtgaattgattgaatcgatacccgtcgccatcgtatgggaggcaaggttggtctttttaagcttcgcgatttcactctcgagctttgccatttccttgtgggcagtcgcgtctgattccgttttataaatggtcgcgaccgttccgcccttcgcaacctttccgccgtcgtcaaattcataagagacaatcccctgcgtctcgtttgtaatcagcgtttcgttgcgcacaacatagccagtcgagtaaatagagtcggcataggacgacagcgcgacggtctgggtttgcaccatggaaaagtttgcgttataaaacagaaaggccaaatagcatataatcaaaaaacacgcgaccgaaatgacgattttttttgctagcgttttattcacccgttttcaccacattccaaattgttgagtatttcacttttttctatgatacggcaggcctctgatagaagctcttcgccggtttctaacgtgtctgtatcgagccagtggattttttcgtcacgtaaaaaccatgtgagctggcgttttgcataccgtcttgtttcctgttttagtttttctgccgcttgtgtaagcgtacactgcccgtcgaaatagggccttaattccttatagccaatcgccatttttgccgtctgcccggtttcccgcgcaaaaaaggcttttgcctctgaaagaagcccgtcttcaagcatgcggccgacgcgttcgtttattcttttgtacaggttttccctgtccctgcattttaagccgattcgtaaatccaaatatggggacggcgtttttctggagcgttcaagctggtttgtcatggttctgccggttgtacggtaaatttcaattgcgcgtacaatccgcttgccgtttttttcttttgcaaggcgcaaggcggattccgggtcgaatttggaaagctcggagagcagcttgtccggcccttcctcttcaagcctttttaaaaggctttgccgcaatgcgttatcgccgctctcctctgaaagctgtatattgttgagcagcgtgctgatataaagccctgtaccgccgacaaggacaggaagccttcccctgccgtggatttcttcaacggcctttcttgcaccgtccgcgtaaagagcgacgctgtaaggctcttttgggtcaagaaaccccatcatatgatgcgggattccctgcatttcctgtaatgaaggctttgccgtcgcgatatccatgcccttgtaaacctgcatggaatcggcagagacaacttccccgccgtatttttttgctatggcaaccccaagcgcggttttgccggaggccgtcggcccaacgacggcaatcagagggattttattcaaagtaaggtcacaccctgccgaattgtttttctatttcgcgccgcttgatgatgatggatatcggcctgccgtgcgggcagtagcggatagtactgtcttcctcaagccgccgggccaaatcgataagctcctgcggatggcttaaattgcccgctttaatggcggcgcggcacgaaacgttatggtaaatccagtccatatgctgggaattgatatcgtttttattttgcagcagatagcccgccatctctatgacggccggctcgatgtcgtcatgcgtcagatactgcggcgcgctgcgtacaagtaccatgcccgcgccgaaatcgctgatttcaaagccagcttcgtcaagcaggcccgcattttgcagcaccgcgtcgtattcaagctttgaaagcgttaccttcacaggctcgagcaggtactgcgcgcagcccttgcccttgtcttttttgagcttttcatagatgagccgctcatgcgccgcgtgcttgtcgataagcatcagctcatcggggcttttctctattataatatatgtctggaaggcttccccgatgaattttgtcgaaacaggctcctgctccagaagcgccgcgggttcttctgcctcctgctccgtttttatttcttctttggcggaaaccggcgtcttgtcctgctttttgtgtgcttccttataggcttcatacgcaagcggcggctccggcttttcttcttccatatcaaaggcgttcgcgttgaacatattgcggctgacctttataacgcccttgtataaatcgaatgggtttgcgctgtcgtgaagcgccgtgccgccgaagctgtgttttttcggcacgaacatctgcggctcttcctcgcctgggtcagccggggcgcctgttttcgcggcatccgcattcttttcccggctcccgggcgtatcgggcatttcaaaggaatcctgctctgtccctgcttttggaggctccggttttatttcaaataaatttgattttttccctgttccctgtttcggcaggaaagaagcgacctttgtttcgtccttattgagcagcgccgactttaccgcgtgatatacggcgtcgaatacagggcgttcattgatgaagcgcacctcgatttttgcgggatggacgttgacgtccaccgcctcgcaggaaatctggatatgcagcacgcaggccggaaatttgccgaccatgacgctgcccttgcaggcctcctccaacgcagccatcgccgtgcggcttttcacaaaacggccgttgataaaaaagttctgcatattcctgttgggacgggcgtttaccggcttgctgacataaccgcttaccgaaacgccgtttaaggagtattctaccggcatcagcccgtttgcaaattccctgccgtatacggagtaaaccgcggataacagctttttatctcccggcgttttcagcgcctgcttgccgtcgcgcaggaaggtaaacgcgacctccgggtgggaaagcgcgattttatccatcacgtttgcaacagcgtttgcctccgatacgtctttctttaaaaatttcatgcgcgcgggaacattataaaacaggtcgcgcacgataatggtcgtaccctttgggcagccggcgtcttcgagcgcttcctcttccccgccgcttatctggtagcgcgttccgagcgtatcctcttccgcgcacgtcatcagctccacatgggaaactgcgcagacggacgcaagcgcctccccgcggaagccaagcgtcccgattttatccaaatcgtcctggagccttaccttgctggttgcgtggcgcaaaaacgccttgggcacatcgccgcgcgctatgccgcagccgttgtccgtaacccgcatatatgtaacgccgccgtttttaatttctaccgtaacgctgccggcacccgcgtcgattgcgttttccaccagctccttgataacggatgaaggacgttccacgacctctcccgccgctatcagctccgcgacatgcttatcgagcacattgattttccccacaaggctcacctccatcagaaattggtttcaggtttatgcgttctcctttgcctggcggattaaatcgaacaggatattcatcgattcaatcggcgtaagcgtattgatatcgacagaaagcagcttttccttgatttgggaagtccccgtgtcgagcagggacatctccatcaggggttccagcgcgctttttgccctttttgttttcttttctacgggagccttgccgttttcgccttcaagctcctttaaaatctgctttgcgcgggttataatccagtccgggatgcccgcgagctttgcaacctcgataccgtagctgtcgtccgcgccgcccggtacaatcctgcgcaaaaacgtgatgtcgtccccacgctttttgaccgcgatattatagttctttacgccgtcgagcaggttttccatgacggtcagctcatggtaatgcgttgcgaaaagcgttttggcgccgagcttctttttgtcggtcacgtattcaagcaccgcgcgcgctatgctcatcccgtcaaaggttgaggttcccctgccgatttcatccaaaatcaacaggctgcgggaggtggcgcttttgacaatatttgcaacctcgttcatctcgaccataaaggttgactgcccggaggccaaatcgtccgacgcgccgacccttgtaaagatgctgtctactatgccgatttccgccgaattcgcgggcacaaagctcccgatttgcgccatcaggacaatcagcgccgcctggcgcatataggtcgatttacccgccatgttcgggccggtgataatggcggtgcggttgtcggcagtatcgagataaacgtcattcgggacgaacggcgcgccgtcgagcaggcactccacaacgggatggcggctgtcttttaatttgatggcaccgcttaaattgacctctggccggcagtagcggttgtctgaggcggtggacgcaaaggaacagagtacatcgagctgcgcaatacactttgcggtgttttgaatccgcgtaagctccgcggcaaccgccttgcgcacctcgtcaaagagcgtatattcaagcgaaacggcgcggtccttcgcgccaagtatccttccctcaagctcttttaattcctgtgtaataaaccgctcgcagtttgtaagcgtctgttttctgatatatgtatcgggcaccatttccttgtaggagtttgaaacctcgatatagtaaccgaatacgcggttatacccaaccttgagctttggtatgccgctgttcctgcgttcctgcgcctcaatgtttgcaagcaggtcggtcgagctgttcatatccccgtttagcatgtcgagctctttgttaaaacccttccggatgataccgccctcccgcacggaaaacggcgggtcgtccacgattgcgcggtcaattaaatcccgcatatcggcaagctcatcgataccttcataaatttcccgcaaatagctggaggaaacgcccgcaagctgctccttgacctccggcagcttttggagcgcggtagaaagcgagcgaagctccctgccgttcgaagttccgtaaacgatgcgcgtcatcagacgctcgatatcgagtacgccggaaagcgtgtttacaagctccaggcgcgtaacggtgctgtttacaagctcctccaccgcgttttgccttttgacaatgggcgcgcagctgataagcggctgttcaatccacgagcgaagcatccgcttgcccatggcggtttttgttttgtcgataacccaaaggaggcttccgcgcttttccttgctgcgcagcgtttccatcagctcaagattgcgccgcgtattgaagtcgaggttcataaactgtgtctcgctgtacacgtcgagcgtattgatgcgctcaagccccgttttctgcgtttctctgaggtaattaagcagcgcgccgataccgcacacgagctcgcgcttgccttcgtcatacaaaggcttcacgttcttttccccgaactgcgaaacggcgcttgcaaagcattcggcgtcgtcaaatttgtcgtcggaaagcatttcaacaccggctgaaagcctgtccctgataaagcccggcagctctttaaaattaaccgtgtccccgccgattagtatttcacgcggggtaaaacgggatagctcgttttgaagctttgcaaggcaatcgctcccctcgagggtggtcgcgtggagctcgcctgtcgaaatatcgcaaaacgcgacgccgacgctgccgttccttgtaaaggcgcagcagatatagttgtttttgccttcgtcaagcatgctgctctcgatgaccgttccgggcgtaatgacgcgtataatatcgcgtttgacgagccccttcgcggttgccgggtcctcggtttgctcacaaatggcaaccttatagcccttggcgacgagccgcgctatgtatgcctcgctgctgtggtagggaacgccgcacatgggcgcgcgttcctcctgcccgcagtccctgcctgttaaggtcagctcgagctccttcgacgcaagctttgcgtcgtcaaagaacatctcgtaaaaatcgccgaggcgaaaaaacaaaatgctgtccttgttctcctctttgattttgaaatattgtttcatcatcgggctgagttcagccattgttttttcacctcatgcgttgtcttttatttttagtggcatccggagcaggaagagcagcttccgccgcagctcggggtataatcggtcgtctccgggtcttccccatccgccgactgggtgataatcgcgatgatgcgctgtaacacggtgtcgagcgcctctttatgatggttataggcgagcatgtttccgtttttcataattttgtcgtacacctcgcgcatttctgtgtttaacgcctgaagcttctcgtcgtcgcggtcggtcttggtcgcctcgttgttaatagccatacgctttaaattaaactggccaatcatctcctgaagctccttgtcctcgtcgctttgctgcttcgcaatctgcagcttcagatagctgtcttccttctggattgcctttccaagctctcttgccatttcgataagttccatttttacatcctcctggttttataaaagctcgccatttaaaatccaattgcgcgcttttgttattttgacatggacaaacgtgccgataagctcctccggcccgtcgtgctccactattatattgccggaagtacgcgaagttaatgcatcgtttttacctgtttttccttctaccaaaaccttgacggtctggccgaccatatgggcgcacctggcagccgcgatttcctcctgcacctgcaaaagctcggaaaaccatttcgatttttcagaagcgggaacagggtcgtccagctttgcggcgggcgtgccggcgcgtggggaaaagataaaggtaaaaagcgatgtaaaacctatttcacgcacaagcgaaagcgtttctttaaaatcctcatacgattcgccggggaaaccgacaatcacatcgcttgtaagcgacacgtctggaattttttcttttgcgtaccggacgatttccaaatactgctccctggtataccgccggttcatctgctttaagatgcggttgctgcccgactggaacggcaggtgcaggtgcaggctgatatgccgtccccgcgcgatggtatctatcagttccttggtgcagtccttcggatggctcgtcataaagcgcagccaataatcaccgtcgatttcgtctatttttgaaagcagctgcgcgaaggtgatatcttcctccagcccttttccgtatgaatttacgttttgcccgagcagcgtaatgtccttatagccggactcgataagcccgcgcgcctccttcaggatttcttccggcttgcggctgcgctccctgccgcgcacatacggtacgacacagtaggaacagaagttgtcgcagccgtacataatgggcagccatcctttaaaggtgccgtcgcgttttacagggatgccctcatgaacgagcctgtcgtcatcgccccttacgaacacgcgttttccggtaaacaggctttcatatagaagctccggaaagcggtgcaggtaatgcgtgccgaaaaccagcccgacaaacggatagcttttataaatgcggtccgctatgtgctgctgctccatcatacagccgcacagcgcgatgagtaccgacgggtgccggcgtttgagcgccttgagcgcgcccacattgccgaacacccggtcctcggcatgttcccggacggcacaggtattgaacaggatgaaatccgcgtcatccggggtatctgtaaaggaatagcccatttcactgagcatccctttgattttttcactgtcggccacattttgctggcagccgtacgtcctgatataggcaagcggcctgccgccgcgcgcgcgcacctgcataatttccgttatgagctgcgtgtattccttttggctatgcgcctgtgttttttcttctgtattttcaggcaatcggtcgtgcctccattcctttaagcttaccgtttataataccatatgacgccgttatcttcaagaggcgacggcggattgcgacataaatttacaattaggacgcattttttccgagatataaagccgggacagtgccgacgataaccgtctctgcaattggtacgttcgttacaacctctacgttcttgaggccttcgtcgccgattaggaacattttggctgtaattgtaagctcgatgatgtgctgcgtctggttgattcccgctgaaacgaacttgctgtcaacctttgtctcgatgctgctttcaaagtcgagcacaatgggaatgcgcggcccttttcctttgagcagctcgattccggaaaggtcgcccgccgcaatttgtatcgcgcggctgcgcagggaatcgatttgcttctgcgcttcgagcgtataggccgcctttaatttgttcatattgagtgaatttgttgtaatgccctggatggagctgccatcctgcgtatattggactgtggcaaggtcgctgtatgtaaaatcgacatcctgaagctctgtctgcgccgccgtattgattgcttcggtcgcaagcgccgttgccttcacattggcgatgccggaaatcattgggcggagcattatttcaaaaaaaataaaaacggcagccgccaaaaccaaaagaaataaaaacacccttttgaacacatttggctttttccgttttctgtaccggtatcggaacatagaaacacccctcgatatactattcgaggggtgtcgattcggttcatgattttcagctcatcaggtcttcttcttcgtccttcttttcagaagcgcagcagccacagccgcattcctcttcctcgtcgaacaaatcggaaaaatcaaactcaaggttttctccgcacttggggcagtccatttcgccggaaaggagcaggtcctcttccaggcagatgacttcgccgcaggtcgggcaggtaacctcataatatacgtcttcatcgtcgtcctcgtcgtcgcaacagccgcagtcgcagctttcaagctcgtcgtagaactcctcttcgaggtcggctaaatcctcgtcgaccgcatcaacctgctcgcatacgtcgtcaaggcactcctcaacctccgtcacggcaagcgccatatcgtccagcaaatcgacgattgcgccgataagcttgacctcgtccttgttttcgtcgagctttaagccctccgccagtcccttgatataagaaattttttcagtcagcgtcatttttgttctccttctgttatgcgcgggccatatattcgcccgtacgcgtgtcgatttgaatcgtatcgccttcattgatgaaaatgggaaccttgatttccgcgcccgtttcaagcgttgcgggtttggtgacgttcgttgcggtatcgccctttacgcccggttctgtctgcgtaacctcaagcgttacaaagttcggcggctctacgccaaatacgttgcccttgtaggaaagcaccttgcaggtcatgttttccttgacgaacttgaagctgtcgccgagtacgctcttgctgattggaatctgctcgtatgtctcgctgtccatgaaataataaaggtcgccgtcgctgtagaggtattccatgtcctttctctcgataaaagcggtcgggtatttgtcgttggggttaaaggtcttttcaacgacagagcctgtaatgacattcctgatttttgtgcgaacgaaagcggcgcccttgcccggcttgacatgctgaaactcgatgatagagacaacctgtccgtccatctcaaaggtgacgccgtttctgaaatctcctgcagatatcataaataaaatcctcctaaaatatacgttgccggtaaaacatacagggtttaccaatttacaaatttatattatacagatgaacccgccaaattgcaacagccaagccgaaaaaattagagaatcatgagttctttggggatatttgtaaggtttgtacagccgcttttggccacgcagactatgtcctcgatacgcacgccgaactttcccggcaggtagatgcccggctctaccgtgacaatcatgccgctgctcaaaatggtttctgatgctgcggaaaggcgcggctcttcatggatgcaaaggccgacgccatggcccgtggaatggccgaagaaatcaccgtagccttcccccttgataatatcgcgagcgagcgcgtcggcatattcgccggtaatacccgcgcgtattcctttgagcgccgtttcctgcgcgttccttacgatatcgtaaatcctctgctgctcttcagttacatggcgtaccgctaccgtgcgcgtcatgtcgctgtggtagccgtcaaataccgcgccgatgtccatcgtgacgaaatctccttcttttacaacggagccgtcgggttcaccgtgcggcagggacgtctttttgccggtaatggtaatcaaatcaaacgctgcgccctgcgcgccgcgttttttcatttcaaattccaggctaagcgcaagctcgcgctccgttacgccgggctttaaaatattcagcgtctcaaggtacgcttcctccgttatgcgctgcgcttccttgattttcataatttcggcgcggcttttaatcagccgcatattgcaaagcagctggtcgagcgtctcatccgctaccgtgccgacggaaaacggctcaagcatctttgcaaaccggtgcgcctgctttacgctgatgccctcgcattcgagataaacggttttgacgcggtgcttttttaaaagtgttttcaggctttcggagagccggtcgaatacaacgacctccatatgcttcacagccttttttgccgcctcgccataacggaagtccacaagcaggtaagcgcttgtccttgttatgagcacacacccggcggaggaacggaagcccgttaaataaaaacggttgacgtccgatgtgaccagcgcagcctctcccggctgcgtcaggccttcgcgcaggcgttcccatctgtttttcatagcaaacccttcttttcagccgttaatcagtcatgatattatgccctttaccgcatcgattgcaaggaaatacacctgtttgccaaagcccgcaatctgccctttgcaaacgggcgcaatgacggaggtatgccggaactcttccctggcgtggatgttcgacatatgcacctcgataaagggcagctccgcgcagggaatggcgtcgcgaagcgcatagctatagtgcgtaagcgcgcccgcgtttataatggcagccaggtaccttccgcgcgccgcgtggatttggtcgattaaaccgccctcgtggttcgattggaaaacatccacttcatagccgcggctgttcccataggcgattacctcttcttttatactttccgcagtctgctgtccgtatacttttttctcgcgcacgccaaccatgttgaggttcgggccgagcagcaaaaggattttattgttcatgctgttttcctcctttttaaaaaggcgttttccttgcttcgattcttttgcggaagcctttcatcaaaaagcgccggaactttacggtgccgcgctcgttttcaaggctgacagggtcgacaagcagcgccttcaaccctaagatctttgcgcccataatatcggtaaaaacctggtcgcccacaactaaaatatcatgccgccttgcgcgcaggcgtattttcgcgcgtaaaaagccaaatggggagggctttaggcaaaagctcacatactccgcgcccagcgcgtcggaaaaaggctttaccctgcttttgaaattgttcgagcataaaacgacgcgcacgccgtgccgcttcatttcacgaagccaggcttctatgccctcatacggctttggcgccccgtaggatttaattgtattgtcgatatcgagaaggacacagcgcacgcggagctttgaaagcatcgcggcatttatgtccgttaccttatgtgtataggctgtcttcatatattctaccaacctgccggatattcaaaaaagcgggcgcaatgcccgctttttcattggagtcgctatcattgcagttaaaagcggtaagttatttaaacttacgcttacgtgccgcttcagacttcttcttgcgcttgacggagggcttttcataagcctctctcttgcgcacctcagcaataacgccggctcttgcgcactgctttttaaaccttctcaaagcgctttcaagagattcgttatccttgattctgacttctgacatctatcttccctcccatccgccatcaggcaggggttgcttgcattgaattgcactaattattatacaataaacatcttccaaatgtcaagactaatgtgcatatttcgacggattatttattgtaccttactttgcgacaatatttacaagcttgcccttgacgtaaatttccttaattatgtgaagcccacttaaagccgcggcggccttctggtcggctttcgcagcggcaagcgcctgctcgttggcggcgtcggcgggaataacaatgcgggaacgcagctttccgtttatttgcaccgcaatttcgaccgtatcctccctgcatttgctttcatcataggaaggccattgctgctgcgcaacaataccttcgcccagcgcgcagatatggaacagctcctccgtaacatgcggagcaaatgggtttaacaggattgtaaagatacgaagctcctctttgttgatggagcccacgttcgtgatatcgttaatcagcgccatgagcgccgcgatagccgtattgaatttaatattctcaatgtcgtccccgacctttttgatggtcttatggaacgcgttctcaagctccgggcggatagaaccgccttcaatgagaatcgattggaggttccagtagcgttcaatgaaacggcggcagcctttgatgctcgacgggttccacggtgcggccttttcaaaatcgcctataaacatttcatacatacgcatggtgtccgcgccgtattcctcgactatgtcgtcggggttgacgacattgcccctggatttactcattttttcgccgttttcaccgagaatcatgccgtggctcgtgcgtttctgatacggctcctttgtcgggacgattcccaaatcataaaggaacttgtgccagaacctgctgtaaagcagatggagcgtcgtgtgctccatgccgccgttgtaccagtcgacgggcgaccagtaatcgatggcctccttcgaggcgagcgcttctttattatgcgggtccatataacgcagataataccaggaggaacccgcccactggggcatggtgtccgtttccctgtgcgcttttgcgccgcacttcgggcaggctgtctctacccaaccggtcatttttgcaagcggggattccccgttttctgtaggctcataggaatcgaccatcggaagctcaagcggcagctcgctttcggggagcgcaacataaccgcatttgtcgcagcggacaatcggaatcggttcgccccaatagcgctggcgggaaaatacccagtcgcgcagcttatagttgaccttggccttacccctgccgttttctgtcagccaatcgattattttgaccttggcttcctcgacgcttaagccattaagtatgccggaattgacaagcacgcccgtttcacagtcggtaaacgcctcttcctgaacgctgccgcctttgacgacctcaatgataggaaggccaaacttcttggcgaattcccagtcacgcgtgtcgtgcgccgggacggccataatcgcgcctgttccataggatacaagcacatagtcggaaataaatacagggatttccttgtcgtttacaggattgactgcgtgaactcctttgagcagaacgcctgttttgtccttggcgacctctgtacgctcaaagtcggactttctcgccgcctgctcctggtaggcgcgcacctcgtccatattttctatggtatccttccacttgtcaatcagcggatgttcgggggaaataaccatgtatgtagcgccgaacagcgtgtcgggacgggttgtgtaaattgtaagcttatcgccggaggaggtatcaaaatcgacctccgcgccggtagagcggccaatccagtttttctgctgcgccttgacgcggtcggggtaatcgacaaggtcaaggtcatcgattagccggtcggcatattcggtgattttaagcatccattgggatttgaccttgcggacgacctcgcttccgcagcgctcgcatacgccgtttacgacctcttcgttcgcaagcacgcatttgcaggacgtacaccagttgacagccatctcctttttataggcaagccccttcttaaacaattggaggaaaatccactgcgtccatttgaaatattccgggtcagtggtgttgatttccctgctccagtcgaacgaaatgccaagcgactgtatttgctgcttaaagcgggcgatgttctgctttgtgacaatttctggatggatatggtttttaatcgcataattttcagtaggcaggccgaacgcgtcccagccgattggatagagtacgttatagccctgtagccttcgtttcctcgcgacggtatcgagcgccgtatatgggcgcggatgccctacgtgaaggccctgtcctgacggataagggaattcaatcagggcgaagaacttctttttgccggaattcggctgagcgtggaacacgcccttctcctcccagattttctgccatttcggttctactgctttgtggtcgtatttcaaaacctttccctcctgaaaataatacgattaaaagataatccgccccctgcctgcaaggacacagggcggaacaaaatttatttacgcaagctccggcaaatcaatggtttcgccatcctgccagagacgctctaggtcataatactgccttgcctcgtcggagaaaacatggacgataacgtcgacgtaatcgagcagtatccagctgtttgaacggtagccctcgatatggctggcagaaacgcccgcctcgcttaatttttcctccacctcgtccgacaacgccttaacatgcgtgctgttattaccggtcgcgatgaccatataatccgcaaggacggaaacgtccgtaatttttatgactttaattttttcaccttttttgccgtcgagcgcgattgccgcgcatttcgcggtttccaatgctgtcaaagaagtccctcctgttgtttttgtagtctgcttaaaacaatttgattatacgccgccagtgtgttcgggtcaatcgccaggtcgcgttttgccaaatccgctatcgaaaaggacagtccaaacagcattgcttcctccaggctttcgcctgatttccggcgcataatctccacaccgtcgtagtcgcgctcctcgcccgtaaagtcggcgacgaaaatcaccttttcaagtaatgacatctgcgcgcgccccgtcgtatgaaaacgaatggcgcttacaatgtctgggtctgttacgctcagctgcatcctgatatacgcggcgccggatattgcgtgccacagcttaggcgataccttttgcacttcgctgagtattataccagacgcctttatcaatttcaactgctcctgcggcggcgtttcctttgtaacgtcgtgcaaaagccccgcgacctccgcttttttaacgtccgccccataaagctttgcaaggcgcaccgcttccttcgctacattgagcgaatggatatagcgcttctcgcccatacgtgatttaatgagtctcttgtaatcgtcgatgaacacagaaatcactccctgtaaaggccatttgtcctgatatattccgcaacgccttcccccgtaagcggggatacgtcgccgcctgccgccgcggcctgccttatgatactcgaagatacctgcataattggttccttgagcacctcgcaccgggcgccgagcgttttcaaaaattccgcgtgttgcaacagcgtttccctgcccgcgccgccgcgcggggcggtacagattgccgcgagtgaaaaaatcgtttccggctctctccaatcctggagcgtcaaaaacatatcagcgccggtaatcaggtaaagctgcgcgttggggtacagctcctttaagctcctaagcgtatcggctgtaaagcttttcccgccgcgttcaagctcaaggcggcttacctcaatcttatcatgcccccgcgccgcaatttgacacatattgaaacggtgggaagcagaagcgagccgcaaggcttccttatgcggcggaacagacgccggcatcagtaaaacaaggtctagctttaaagatgaaataaatgcctgggccaaaccgatatgccccagatgtatgggattgaacgtgccgccgagtatcccaagcctattgactccgccggtcatgcgcggcttgctttgggcaattcgattttcggctccttgcggtttttgcggtagagcacaaatttgctgccgattacctgtacaacgtccgcgtttaccgcctgcgcaatctcctgcgccgcgtcccgcggcgtctggccggcagattcaagcaccttgcccttaatcagctcgcgcgccgtgagcgcgtcgtccgcctgcttgattatttggccgttcatgccgcccttgcccaccataacgatggtgtcgattgtgtttgcaaggccgcgcaggtacgcccgctgtttgctgttgagcatataattcctccgtatattaaatggaatagtatttttcaagttctgctttcaatgcgcgcagggcgttccccctgtggcttattgcgtccttttcctccgccgatagctgtgcatagcttctgccgccgtccacaaggaaaaccgggtcatagccaaagccgccctcgccaagcggtgcaaacgcgattttgccgctgcacgttccaaatacctcaagcattgtgccatcctgcaaaatacagcagatggcgcttgcaaacgaagcggtgcgcttctcaatcggaacgtcgctgagctctcccaaaagcttgtggattttatcaaggtcgctcgcgccctccccgccgtagcgggccgaataaacgcccgggcgaccaccgagcgcgtcaaccatcagcccggaatcgtccgcaacgcttggcattccggtgctttcaaaagccgcccgcgccttaagccgcgcgttttcctggaaggtcgtgccggtttcctctacctcgccgagcgtaaagcccgcttgttttgccgtcttagccgtgatgccaagcgggtttaaaatgcgttccatctcttttatttttttggggttattggatgcgataataaacgtttccatacaggcacctcaataggaatctttttcgtggtcgaacagcgccttggcgaagtcctgtgcgtcaaacggctgcaaatcgtcgatttgctcgccaacaccgatatatttaaccggtacgtccagctcttccttgatggaaagcaccacgccgccctttgccgtaccgtcgagctttgtcaggacaatgcccgtaatccccgccgcgtttttgaattcgcgcgcctgattgacggcgttctgccccgtggttgcgtcgagcaccagcaggatttccttgtcggcgtccggcagctccctgtcgataatcctgccgattttcgcaagctcgtccatcaaatgctttttattgtgcagcctgcccgcggtatcgcagataatgacgtctgcgttctttgctttcgctgaggaaattgcgtcgaacacgacagccgcagggtcggagccctcgttttgcttgacgatttcacatttactcctctgcgcccatatttcaagctggtcgattgccgcagcgcggaaggtatccgccgccgcgagcaaaacctttttgccgtcctgtcgcaggttgtttgcaagcttgcctatcgtcgtcgtctttcctacgccgtttacgccgatgactaaaataatcgacggcttcgtatcaagcttaagctgttctccgcctgtaagcagctccgcgacgatttctgaaaggagcctgtggatttcgcccgggtcggtcacgccttcctttttgacacgctcacgcagaagctctgtgatacgctgtgaggtgtggacgcccacgtcacccatgacgagcagctcttccagctcttcaaacagcgcctcgtctattttagtaaaggacttgagcatcgtatcgatttgcccgacgacggaatccctcgtctttttaagcccctcttttattttactgaaaaatcccattggttttgccttcctttatcttccttattgtcccgtattcaagcgccgcgctgggacggccttccggcagtttcggtcgtgcgcagctccaaaagcttggaaacgccctcatcctgcatggttacgccgtaaagcacgtcggcctcttccattgtgccgcggcggtgcgtaatgagaataaactgcgttttatcgttcatttggcgcaggtacgcggcaaaacggtctacgtttacctcgtcgagcgcggcttcgatttcgtccatcacgcagaacggcgccggacttaccttcattatagcaaaatataaggcaattgcaaccaaagctttctcgccgcccgaaagcgcttccaggtgtacgacgatttttcctggcggatgcacgataatatcgataccgctttgcaggatatcctccgggtcggtaagctccaggtaagcctttcctccgccgaagagttccctgaacgtacttgtgaagttttcgttgatttggtggaagcgttcgataaaaatttcacgcatttgctttgtgaggtctccgattaagcgcaggatttccgcgcgcgatttttccacgtccccgacctggacggtcataaacgcaaaccgctcggaaacctccttgtattcttcgattgccgcaacgtttaccgtgccgagcgccttgattttcgatttcagctcgtttaaccgccgtttggcttcctggacattttcaagcggcgggacggtttcctccgcctcgcgcctggtcagctcatattcttcccaaagttgcgcgataatatcgtcgtactgcttctgtaggctcaatttccgttcctccagccttgcaagctcgcggccggaaagctcgcgctctgcgtttttctcccgctccagcttacgaagctccgcgctgcgcgtgtcaaactgcgcgcgctccctttgcagcgcttcgatttttccatgcgaatcgtttacgtcccgttcaatttcagcaatagactgcctcagcgtttcaatttgctttgtaacctgttcgctgcgcaggttcaggtgcatgatttcctcgcgcagccccgcgcggcgggcctcctgcgtggtgccggtgcttttggcaagtgaaatttcagatttcagcgcctcgatgtccttttgtgccgtgacaatttccaaacggaattcctgcagactgcgcgcgtattcctcgcgtttcgccgcaagctcctcgcggctgccggtgatatcgcctgatttcttttccgccagggcgatttccccgttcagctcagccagctcccgcttggcctgctcgttcgttttgtgaagcaaatcgatgcgtcctgtacactgggtgtattccgcgttgatttcagcaagcgccctggaggtgctttcaagctcagtagagcagctgttgtactgcgcgtctgtgcggatgcattcctcctgcacgctggaatattccgcacgcagggataaaagttcagcctcggcgccggacgcttcgttttgtattgccttgaatgtctcctgtgcctggcgcgctttttctgaaagctcctttgccgtctgcttgttcttttcaatttcgctgacgcggctcaaaagccccgattttctcgcaagggaaccgccggtcaaggaaccgcccgcgtttaccacctggccgtcgagcgtgacgacgcggaaccggtaggaaaaacgctttgcaatcgcaaccgcgctgtttaagtcctcggcaatcgcaatcctgccgagcagggagtgcaaaatcccgttatactgcgcgtcgcacgagcaaaggccgcttgcaataccgacgaagccgccgcaggcttcaagcccgcgttcattcagaacgccgcccttgattgtcgtcatcggcaggaaggtcgcgcgcccgccgtccttctgcttgagcaggccaatcgcgcgctttgcgtcctcctctgttgaggtgacgatgttctgcatagcggcgccgagcgccgtctcgattgcgacgttatactgcggcggcacctttattacgcgcgaaaccggtccgtggatgccggaaagcgtgccgcgcgcggcttccttcatcacaattttgacgctgtggttaaagccctcgaggtttcgttccaaatcctcgagcattttcacacggcgcaggcgctcctgcgcgtcgagcagcagcctgtctgcctgctgctttgcctcgtcacgttttttctgtttgcctgcaagcttaatttcgcagccttttatagagtttgtaagctgctgcgctttgtcggcagcctctttttttgctttctcatagaatgcaagcaggcctgtaagctcttcctttgccttttctttttcttccctggagcgtccgagcgtttccatacgggcggaaagctcagagatagaagattcgcttgtcatctgggaaacgcggatatccgccgcctttgcgctcagctttgtaagggtaagcgatacctcctgcaataaatcagtgctgcggcttgcgttcaggttgatttcacccagctcctgcgcgcaggcgtcgtatgctttttgcaggctttcaaccttttcgctatgtacgccgattgcgcgcgttttttcttcgacttccttttctatgttcagagaggtggaatcgagctgttcaatctcgttttccagcctcctaatgttttcttcgttatgcctgatatcgttctccgaaacggaaacgagcgcgcgtttttgggaagcctgttcctcaagcgcggagatttcacggcgcaccgcgtctatctttgccgcctgctcgccgctttttaagaacagcgcttccgtctctgcgctgatgcggtcaagctcgtcggcggccgcgtcgttctggcttttcgcaatagagattttctcctcctgcgcgcgcaggacgcctgccgatttttcgagtgtgtcgagccagataccgatttcaagctcgcgcttttctttggaatagcttaaaaacgcttccgcttttttcgcctgcgtttcaagcggccccacgcgctcctccagctcctgcaggatgtcgcgcaggcgcagcaggttttcctccgtcgcctttaatttacgctctgcttctatttttctgtagcggtaacgggagattccagcggcttcttcaaaaatttcacgcctgtcctcgctttttgaggcgacaatgctatcgattttcccctgcccaatcatcgagtagccgtctctccccaacccggtatccataaacagctcgtggatatccttgaggcgcacggcggccttgtttatcatatactcgctgtcgccgctgcggtaatagcggcgcgtaaccgccacctcgtccccattatagggcagggcgcggtccctgttttcaatggtcagcgtaacctccgcatagccctgctttttccggtcgtcggtgccgttgaagacaacatcttccatttttgagcagcgcagggatttcggcgactgctcgccgagcacccagcggatggcgtcgctgatattgcttttgccggagccgttcgggcctacaatcgaagtaatgccccggtcgaacgtcagcttcgttttatcgggaaacgtcttgaatccctgaatttccagtgattttagcagcacagtatcactccgtcacatttttctcatcccacttgataaacgcggttttatcgttcctacttaaagcccgcccgcaaaagcgcagcgcgccctcctctttcgccctggctgtcagcatctccctgtaacagccgtattccccggcgacattgcacgcgtgcctgagcagcacggcggcatagccgcggttcctgtaattttatccgtaactacatttttgagcggcgcgtaagggcgcgccgtgtgtaaggcttttaaccggcacgagaacacgggaagaaacaagccccccgccttccttataaccataaacacgctgtcggctgcccgacagatatttgaaaacaccgcgcgcagcctttttcaccggacacacgttcttttcgcccggattgagctgtaaagggaaacgggccgttcaaaatccccgggttttatttccctgattaccattgccttcctccgcgattaccgagcccgcgggaacgctttcatcctgcacgatttccgcctggtaccccagctttaaaagctcgttcaaattgcttttcctctgcccgcaggcttttgaggccgcacgcgggtttaccctcagggcaagcgcgccgcgcggaagccttttttccttgatttgttttgttatatccagcaggagaatcctgctttcgcacaattcccgtaaagcggggtggtaaggccccgcgattctttcttcctttaagccttcgctgtcgtgcaggcccagccggataacgggaatgccgtgttcttcaaagtatatcagtaaagaggaacaaagcgcgaccgtatcctccagcgtgggcggaacatatcttccgcagcggtaaagcgtttcaagcgccgttcccttcattgtaactgtagggtaaatccgcacggtatcgggtataagcgcggcaattcgctcagcagtttcaaaatcaagctgcggcgtgcttttataaagccctgtcatcatctgcaggccgagtgaaaagccgtgctgccgtatcctgcgcgaagcatcttctacatttttcgcggtatgccccctgttgttttccttgagcaccgtatcgcacatgctctgcgcgcccagctcaatggaggtcaccccatacgactttaaaagtgaaagaatttgttcatcgatacaatccgggcgtgtggagatgcggataccgcttaaagcgcccctttttaaatacggctgcgccggcattagcagcgataccatatagtccctgtcaacagcggtaaagcttccgccgaaaaaggcaagctccatattttttgagccgcctttaaaggtagcaagtgcgcgcgctatcgcgccgtccacatcctgcgcagagggttggcaagaatttcccgtgattgcacgctggttgcagaagctgcactggtgcgtacagccgttatgcgggacaaagaccgctatgtttgcgtgcttcaataacccatcagctccatcgcttcacgcgcggcctgttgttcggcctcttttttgctcttgccgccgcccttgccgattacattgctgttcaagcgtacctccaccaggaaatgcttgtcgtggtccggcccgctttcaccaaccaggacataatgcagccgctcctccggattcctctgcacaatttcctgcaggcatgttttataatccttaaacttgcgcggcttggggcttttgatatcgggttcaacaaaccgcaggatatgcctgcggacattttccatcccgccgtctaaataaattgccgcgattaccgcctcaaacgcgtctgcaagaatcgacgggcgctgtgcgccgccgctgtggcgttcgccccggctgagctttaagtaatcgcccagacgtattgtacgcgcgtaaccggcgagcgccttctcgcacacgagagaggcgcgcagctttgtaagctcaccttcgggaagcttggggcaatttttaaaaataaagtccgaaacgacgatgctcagtaccgcgtcgcccagaaattcgagacgttcattgcatttgaccgaacccttcacctcattagcgtaagaggaatgcgtaagcgcagtttcaagaagggacgggtctttaaaggtatagcgcagctcctgttgcagctcttccatttttattcctcctttggcgcgcaggcgctgataagattcatgatttcacccgtaacgccgccctcgacatactgcttggtcaggcggatggcgctttttatcgtctttgcctttgcgctgccatgcgccttgaacacaggcttcgacacgcccataatcggggagccgccgtactcgttataatcaaactgttttttcatgtcctttaaatcggacataaccattgcggccgcgagctttgtttttagattttttgtgaacatgtccttaattttgtccatcaacaccattgcgacgccctcatatgtttttaaaatgaggttaccggtgaagccgtcggttacgagcacgtcgcacgcgccggccgggaaatcccttccttcgatgttgccgacaaaatgaaggccgctgtcctttaaaagcgcaaaggtttcatgctggaggctgccgcccttgtgttcctcggtgcctacgttagcaaggccgacgcgcgggtttttgacgcccatgaccttatccatataaatagagcccatctgcccgaactgcaggagcatttccgggcggcactccacgttagcaccgcagtcgatgagcattgcgcagccggtttccgtcggcatgaccggagcaaagcccggccgcctgacgcccttgatgcgcttgacaagcagcgtcgcaccaacgacgagcgccccgctgttgcccgcggaaacaaacgcgtcgccctttccttcagcaagcagcgcaagccccgccgtcatggaggaatccgtcttgcgcttgaccgcggcacttgcctcgtcgtccattgtaattacgcccggcgcgtgtacaatttccatatgctccaaagagacggcgttttcctgcgccgttttccggataatatcctcatcgcccgtcaaaattacgtcgatgccgaattcttcgatggaaagcgccgcgccctttataatctcaagcggcgcattgtcgccgccaaatgcgtcaagaataatcttcatatcgtgtccaatcctttcactggcgcctaaatgtccgcgtcctgtatcgtctggctgagtgcggagaaggaacgccgcgcatactccgccgcgcgttcccgcttgtcgcgtatgtgatgcgcaagcggcggcaatacgcccacatttgcgcccatcggctgaaaattcactatgctttcgtcgctgatataagcggcaagggaacccatcatacatacgcgcggcagcgttatgccgtcctgccccagagcggccctggctgcgtttattccggccagaagcccggaggaagccgattccatatagccttccacgccggtgagctggcccgcgaagaaaagcgcggggtcttccctgctggaaaaatccgcgtttaaaatgcgcggggaatcgataaatgtgttgcggtgcatcacgccgtaacggacaaaatcggcgtgatgcagggccggaatcatcccgaatacgcgcttctgctccggaaattttaaattggtctggaagcccaccaggttatacattgtcccctgcgcgttctccctgcgcagctgcagcacagcccatggcctgtgcccggttctcgggtcgcgcaggccgaccggcttcattgggccaaagcggagcgtgtcctgcccgcgctgcgccataacctcgaccggcatgcagccctcgtataccttcgggctgcttacgtcgaaatcatgaagcggcgcgcgctctgcctggatgagcgcctcataaaaggcttcatactcctctttgttcatcgggcagttgatataatcgtcatcgccgcccttatcgtagcgggaggcacagaaagcgcgctccatatcgatgctgtcccttgtgacaatcggggccgccgcgtcgaaaaagctcaatgagccgccgaacctgctggcaatatccgccgcaagcgcaccggaggtaagcggtcctgtcgcaacgacgcggacaccgtcccttggcaaagaaacgatttcttcttccctgattttaatcagcgggtgcgccttgattttttccgtaaccatccgcgaaaagagcaagcggtcaacggcaagcgccccgcccgcaggaacggcgcatgaatcagcacattccatcaaaagggacgaaagcatgcgcatttcctgcttgagcataccggcagcgctttctacgcgcgcggccttgagcgaattggagcagacaagctcggaaaacaaatcgctgctgtgcgcaggcgtttttttcttcggcttcatttctataagcacgaccggcacgccgcgccgcgcaatctgccacgcggcttcacagccggctaagcccgcaccgattaccgttacggtcattctttgttttcctctattttcttttcaaagccgcagccctctttcgcacagtagaggaccggctttttgccttttttcttgtacaggatttcgccgcagctggggcacttttcgttgaccggttcgttccatgaaacgaaatcgcactgcgggtaattgctgcagccgtagaacggcttgccctttttcgtcttcctgacgataacgttgccgccgcatttcgggcaggtcacgccaatctcctggacaaactttttcacgtttttgcattccggatagcccgggcaggcaataaatttgccgtaccgaccgaccttaacgaccattttcctgccgcaaagctcgcagacgatatccgtctcgtcctctttgaggtgcagctttacgccctccatctcggttttcgcttttttgagcgtcttgtcgaaatcgccgtagaagctgtccagcaggctgacccactgctcgcttcccttttcaattttatcgaggtcctgctccatctgcgcggtaaacttgacgtttacaatctttggaaagcgctccttcatcagcttggtcgtcacctcgccgagctccgtcgggaagagcgttttgccctcgcgcttgacgtattccctgttggtgatggtcgtgatggtcgcggcgtacgtagacgggcggccaatgccgttttcttcgagcgccttgatgagcgacgcttccgtaaagcgtgccggcggctgcgtgaagtgctggttggggacgagctcctttagtttaaggggcatatccttttccagcgtgggaagctgcttttccttttcttcctcggtatccttgccctccacgtacagcacggtaaagccgtcaaaatcgaccttatagccggacgccttaaagagatagccgttcgcgccgatatccgcctgcgtcgttttctggatgcagtcggccatctggcaggcggtaaagcgctcccagacgagcttataaagcttatattggtcggagcttaagctgctcttgattttatccggctcaagggacggcatggtcgggcggattgcctcatggccgtcctgcgcgcttgcgcgggacttgaagaaacgcggctttgagggaaggtatctgtcgccgtaacggcctttgataaattctgtaacctcagctatcgcgtcgttcgagatacgcagtgaatccgttctcatataggtaatcaaaccgaccgcgcccagctcggggatttcaacgccttcataaagctcctgcgcgaccttcatggtacgccgcgactggaagccgagcttcctcgaagcctcctgctggagcgtggaagtgatgaagggcggcgcgggcgactttttacgcgttccgtttttgaccttcagcacggtatactgcgcgccgtcgaggtcttttaaaatttgggctgcctgttcctcgtttgtgattttcagcttgcccttctcgtcgccataaagggacgcggggaacgattttctgctgcccttggggatgaatttcgcgtcgattgaccagtattcttccggcttaaacgcgcggatttcctcctcgcggtctacgataatacgcacggcgacagactgtaccctgccggcggaaagccccctgcggattttttgtgacaggaacgggcttagcttatagcccataagcctgtcgagaatcctcctggcctgctgggcgtttaccaggtcgatgtcgatggcgcggggatgccccataccgttttgcacgccggtttttgtaatttcgttgaattctatcctgtttttatcgtcaagctccaggccgagcaggtatgcaagatgccaggagattgcctcgccctcgcggtcggggtcagtcgcaagataaacggcgtcgctcttcgcggcggcttttttaagcttatcgacaagctcttccttacccttgattacctcgtagcgcggtgtaaagttatttttgatatcgacgcaaaggcgcgcctctggcaggtcccttacgtggcccattgaagcaacgacgtcaaaatcttttcccaaatattttttaatggtttttgctttcgccggtgactccacaattaccaaatttgacatgtttcgttttcattccttccgcgggaaactcccgcaaaaaaataagttgcccttataccctgcagtaacgcctgccgggcgcctgacgcaccaaaccggaaagctcaagctccgtcaacgccgcaagaaggctcccggcgggaagcccaagccgttcaatcagcaaatcgacatgtaacggaatttcactttcagacaatacgccgagcaccgcctgcgcgtcctgcgtcaggggttctttctctttcccattttcttttctgaccggcttcatatcatttttatgatacgcagcgggctgcggattatcatagcttttttcgcgcgccctgctcgccgccgtcggcactgcgttgatttcacgttcaaaatcctggcttacaggcgtttcttccggaagctcgtccacaccaagatattcctctaaaatgtccgaaaagcttgtgaccgcacgcgctccctgcttgataagggtgttcgagcccctgcatacggtgttcgtaatactgccgggtaccgcgaacacatccctgttctgctcaagcgcaaggtcagcggtgataagcgagccgcttttctcccccgcctccaccacaagcacaccgtttgacaggcccgaaataatgcggttgcgcatcgggaaattgcgcgcaagcggtttaaagtccggcgggtattccgaaatgaccgcgccgttcacggtaatgagccttcgcatctgctcgttttccatcaagtaacggcagttgatgccgcaccccagcacacagaccgttacgccgcccgactgcaaaacgccgcgatgcgccgcacagtcgataccgagcgccccgccgcttaccacgacggcgcccgcccttgcaaggtcggctgacatcgtaaaggctgtacgcacgccttcgcgcgttgctgtacgcgtcccgacgacggcgacgcacagataatcgtccagctttggcagcgcgccgtccacatataaaacacagggtggattatagatttccttgagccgtttgggataaatttcatccgcaaacgttattatattgtaattcaaactttcgcatcggtcaataaccgtctgtgaattttgcagctcctctttcgaaaaagcgttttcctgcgctggggtaaaatgtgcgcacagccgcttttgggcaaggcttgcgtggtaaaaatcctctatattgggataagccgcggcaatttgcctgattctgggattgccatagcccagcacgcgctgcagccaaatccagtagagcgcacggttgtccctccggttcatatacgctccctgaccatttcccacataacgatagacgcggcggtagccgcattgagcgattccgcgcggccgcccatcgggatggtggtctcctcggcgcatgcgtcgaggagctcctgcgacaggccgtttccttcatttccgataaagacggccgctttgtcctcctttgataaggaaagctttgtgacgggaggcgcgccgcggtcggcgacagcgccaaatgtcgtaaacccgtttagctgcaggcttaacgcatacgcgggcaaatcgtccgtaaccatataattcagacggaagaccgcgcccatgctgccgcgcaggaccttcggcgaataaatatcgcagcagtccttagacataaccacgccggttatcccgagcgcctcggcagtacgcaggattgttcccatattttgcgggtcccgtatgctctcaaggccaatataggagccgtcttccaaatgaaaggattcctcccgcatgcggcagacacataaaatgccctgtggtgtaactaaatcggaaagcgcagaaaacaggttccgctgaaagatatatgttttttttgccccgtcgcacaacctgtcgataagctgcgcgtgcttttccaatgcgtcctgcataatgcaaaccttttgaattttgattccgctttgcagcgcgtcttcgcagagccttgcgccttcaatgacaaaaagacggtttttaagcctgtgttttgtactttttgaaagtttttgaatttcctttaccgccgtgttttccctgcttgtaatcgcgtccattactggcagcaccgcccttcttttttaattttatgagaagcttatgtacgaaaagagcgtttgggagtgttctcccaaacgcagctttcacttttcttatgcgtttttcgcctgctcgacaagttttgcaaaggacgccgggtcagcgattgcaatttcggacagcatctttctgttgagcgtaacgcctgcctttttcaggccgttcataaaggtagaatagttgattccgttcatacggcacccagccgaaatacgggtaatccacaggcggcggaaatctcttttgcgctgcttgcgtccaatataggcgtaattgccgcttttcataacggcctgttttgccattttaaaatgcttgctctttgcaccccaatagcccttcgcgagctttaatgtcttttttctcctcttgcgcgtcatcatcgcaccttttacacgtgccattttatgttacctccgttattggttgattttgttgttaagaaagcgcgctcctactcttatttgtaggggatcagcctcttgatctgcacgacgttcgtcttgtcggctaccgtggtctgcctcaagcctctcttgcgctttgtggatttcttgttgaggatgtggcttttatttgcgtgcgcgcggatgactttaccgttctttgtaagcttaaagcgctttttcgcaccgctgtgtgttttaattttaggcataatattttgtcctccttgaaagttttatttcgtgggctttggagcaaggaacatcagcatattgcgtccttcgagctttgcgggcttttcgacattggctgcttcctcgcatgcctgcgcaaattttttcattgtttcatagccctgttcgggatggcccatctctctgcccctgaaacgaatcgaaaccttaaccttatcccctgcctgcaaaaagcgcagggcatggccgagcttcgtattgaaatcatgcgtgtctatattcaaggaaagcctaatttccttgatttcaaccacgcgctgatttttacgcgcttccttttccctcttggcctgctcaaacttatacttgccataatccataatcttgcatacgggcggcgttacctgcggggcaatcttcaccaaatcaagattttgttcctccgcgagagccatagccttgcttgtgggcatgattccgagctgcgagccgtcgttaccgattaccctgagttctctgtctcgaatttcgtcgttaatctgtagttccttgttgctgatggttaagcacctccaaaatgttatgtttgaataaataaaaagcgcgggcagaaaatccgcccgcagcaatacaaccaacttccgcacaaaaatgcgttatgtcctgtattgacccatgcagacggcactccataggtgaaagcattcctgccttgctttatttacctgactattatagcaggcgcgtacccgcttgtcaacatgtttgccacattttttcaagcacgtcggcgcttactggcggagcggccttgccggctattatagcatacgaaagcataaacggcaacgatataaattaaggcgcgcacttgtagtacgcgcccgtgcttaaaatcgtcaaacctctgtaatttttatgttgtcgaactcgattcccgactgcccggtcacgatatccttaatcgcaatgaccccatcgtcgtcgagctcgcctttacatacgacgatgctgcactcgccgttctggataaacgcaaggcactgtgaaaagccctttgccttgataaggctctcgatattggtttcctgctccatatttttagcgatttccgccgccttgcctactgcttccttcttggcctcgtctgaggagtccgccgcttccagcacttcttttgcaaggtcggcagcgccgtcgtgcgttttctggcgttccaccttcacctgtgcaaagtaggcgagcgcatcctcactcggctgcgcctttttgcttgtgtccttggaggaattggaagaggtactgctgctcgtgtttttgtcctttgacacggagctgtccgtcgaattgtttacaaactgcgcctggcctatctgcttgttcgcgtttgcagaggtttgctggatgagcgagctgttgtccgcgaattgccagttgagatataccgccgcgccgagcgcaaccaccaatgccgccaatacaagctgtctttttccgaatttcatttctatgtcctccttgttattctgagagttttgtcacgcaaacctttgcggacgatatattaagtgccttcgtcactgcctcaagcactctctgctgaacctcgatatccccgccgccgctgcacacgaccacgacgccgcgtactgtcggctggatttccttgagtacgattgcctgctccgtgccgtctgaaaggcgtacggtaatgtagtttttttccttgtcggacgattcatccgttttggtactgccgtcgcccttcccgttttgcaggcttttgctttccttttcatcggcggcgtaaacgtactccgttccgctgtcaactgtaacgtaaagctttgtcgtccccgcgccttcgatactcgaaataatatcctgaaggctcgcttcgatttcctgcttgtacgcaagcgccgtctgggacgacgtataaacggtctgttccggggacggctgcgttttggagcccgaatcgaagaaattggagataaaaatcagcgcgattgcggcaagccccgcaataatgatgaactttttatacttttcatctgcaaccaggctatggagcttttccttccattttccttttctttcctcatcctgcatttgcatcatccccttccgcgacgacaacctttgtttttaaatccagttccttttccaccgccgcttttattttgacagcgtcgtccttgtaccgcggctcgaccgtaacggtaaccaatacaatagatatgctgccgccgtccgcgctatccatggtaagcgcaatattttgcgctttcgcgcctgttttttcaacgcaatcctcgacaagcttcgcaacgcttgtcttggcgatttcctctgattggctcgttacatcctcagaaaatcccgaggttgtctctttttcaaaatctatgccgcttaattccgcttttataccggaaaccagggttccaagcggaaaaattacggcgcacagcataaacgcacccaatacgaagcgcagtattttatccattgtcccgttcggcgccagaagctccagcaccaggcccgcgcaggcgcagacacaaatcaccgtggcccaggccgctaccgcttccatatcagcttccccctatcatcaggatgattgtcgtcgatatgatgaaaaccgtcatacagcacagaagaatggcgataagcgtgctgatgaccttgcccgccgaacgcagcagcgcgctcgggacactaagcccgaacacgtcccccgcggcggcgcatacgttgatagtcaaaagccagacgaggcattcaaggagcgcaggcaaaaaaataaaaacgctgcctaataccgcgaagatgccaacgccggatttaagcattttcacacagctttgcaccgttaaaaaggcgtcgctcagggcactgcccaccatagggacaaagctgctgatagcaaagcgcgtggcgcgcacacccgcggaatccgctgccgtaccgataatcgtctggaatgtgagaattgaaacgaatacggacatcacaaacgtgagcacccatttcgtcaccttggaaaacaggtcgcagataccctttaaattaatgcgctgggagacggagcttacgacggaaaggcccagaaaaacattgagcagcggcacgataacatgggaggcaatctgtgtgacgacctgccccgcgcccatcatcagcgcatagtaggaggcgcccgatacagcctgtcccgccgcaaccataacgcccgccatcaccgggatataaatcagcagaaaggaggacgcagtctggatgatgcccgcgctcgtcgcgatggtttcaacaatcgggtaaatcagcactccgcagatgcagagcgtcccgaccgtgccgataatcccgccgagcggcttttccccgaaggagagcttcataccgtctaccaaagcacatagcagcatcaaagcaagcacctttccggttgcaaagagcggcgaagcgctgttttgcccggccatacttaaaatttttgacatgaccgcaccgaagctcagggaattgagctgttcccagcttggggagtctacgccgatgtcctccatcgatttctgggcgttcggcggaagctcgtcaaagagctcgtccgccccgctgtttttaagctgctcgccatatatttcgttgattccctgctccttgtcccgcggctgtgtttcctcctcagccgcgcggacgggcaaggagaaaataagaaggaaaagcaaaaaaaagagcggaaatatccatttttttctcagcttcatgcgttttaccattcctttatccgcctttcggtcatccgccgataattccgacggccgtctgagtgatgtcctcaatcattggcagggcaatcagcacaatcatgagcttgcccgcaagctccaccttagaggcgagcgccgactgtccggcgtccttgcacgcgtctgaagaaaactggcacaggaaacaaatcccgagcgatttcaggaggataccgccgtattccacgggcattcccgcgcgggtaagcaggctgttcacctggttaagcgcgggcgagatttttgagagaatcaaagcaaaaacgacgacgcccgccccaaccgcgacaagcatggaaatctccggattgtattttttcagcatgacggaaagcaccgccgctatgatgaccgccacgcacagtcccaggatattcatagcctacagcccaaacagcgacttgatggttgaaaacaggccgcttatctgctgtacaatcatcagcagtacgacgattaggcccgcaagcgtcgtcatcattgcctgctcctccctgccggagcgtatcagcacctggttgagcacggcgactatgatgccgatggcggcaattttaaaaatcaaatcaacgtccactgtgttttccccttcctgttacagaatcaaaagcgatacggccacgccggagaacagcccgagcatccggtaaagctttaccttcttttctttttcctctcgcgcctgcttgagccttgaggaaaacatcgtcttatacagctcgcaatgcgcaagctgcccttccacgtcggtcgtgcctaagccctggccgaagtccgtaagcaggcggatatcctcctttgaaagccccatgctgtgcggaagctgcatgagcgcgttctgccacgcctcaaagaaggacgcgccgctttccattccctgcgcgcatacctcaagcagcggctgcaaaagctttccggagcctgtgcggaggagtaccggaaggctgtccccgcaaaaacgcatctgcgtctgcaagtccgtcaaaaaaccaaccgcctgttcaaaaaaagaggcccgcatgattacgcgctgcgacgccgacagcccgattaacgctcctgaaatgataatgaccgttaccgacagtatccgcagcatgaaaaagcgcctccgtttcgatatattccctgatttctcccggctgctcccttcccttgaggaacgcaacgtgctcaaacgcccccgactgcaaaagccgccggccctgcacgcggcccaaaagctccgcgcgtgttgaggcgtggatgctcgctatcatggaaacaccggcgttcagcccctgctcgatagcgcgtacatcgtcggttgtgccggcctcatcacagatgataatttccggcgaaaggcagcgcaccgcctgtaaaatcccttcgcccttgctgtagccgtccaggatatcgctctgtcccaaatcgttttggtaaacgcccgagcaggttcccgccagctcgccgcgttcatcgacgacggcgacttttttcatatatgtattggaaagctggcgggacaggtcgcgcaggattgtcgttttaccgcacgacggcgcgccgcagagcaaaagcccgccgaaatccccgttcatcatctccagcagcttatccgccgccccgctgatttgccgcgcaatcctgatattgatggaagatacgtcgcggatattggacagtgtgccgttctggtaaacggctgtgccgcacagccccgcgcggtggcctccctgcatcgtcaaaaagccgtgcttgatttcgttttggtggctgtagacagaatagccgcagatgctttggaacgtatcggacacatccttcggcgtgacaatcagcataccgctgccgcagtacgccgtaacgggccttgactgcgccgtcaggtaatacatacggttgctgcagtaaaccgcaagcggccgcccgctgcggatacggatttcctgagcctgctccttgatgccctgcggcaggctcataaccgccgcgcgcaggcgggggcacaggccctttgccgccatatcgaaccgtccggtaaactgggtgtccggcatatgtcattcctccgtttttggtcttgtccttttcgggatatttcattatatggacaggtcgtcccatttagaacaggatattaaacaggggttaaaaccttctatgaggttggcaaaatctttaacgactcatggacggctcctgcccagggaacggaagcggaaaacgcttcgcagccggccaatttaaagtccgtcccttggaaagcaggctgaacgcgcactcaaaaaaccaataaaggaagccgccaaaaggcggcttccttttaaattccagagttctctcttatattaaaagccggtttcccttctgtataaaaggaaaccggctgtattttttactttattcagcgtccgcacattttaagaaactcttcttcggaaattacggctacgccgagtgactgcgcttttgcaagcttgctgccggcatcttcgcccgcgagcacataatctgtctttttcgacacggaggacgaggcctttccgccgagctcctcgattattttcgacgcttcgcttcgcttgagcgtagggagcgttccggtgagcacaaaggttttcccctggaacaaaccgccctccgctttctgcgcgggcggcatttttacgcccagctctttaaactgcgcaatcagttcttttgtatgggcaagcgcaaaataatcagccgcgcttttggccattacgccgccgaagccgtcgatttgttcgatttcttccgcagaagcccccattatcgcttcaattgtgccaaaattcgcgcacaaaagctttgcggccttctgcccgatatggcggatgccgagcgcgtacaccaagcggtacagctcattttcctttgatttttccaccgcgcttatcaggttagcggtggaaagctcgcccatgcgctccaggttctggatacgctgcgggtcgagacggtacatgtctacgggcgatttgaccagcccttcgtttacaagctgttccagcacggcgggccccatgccctcgatatccatagcgtccctcgatacgaaatggattaggtggcgcatcagctgcgccgggcagtccgtattcgtacagcgcagggcggcctcgtcttcttcgcgcacaacaaggctgccgcaggacggacaggtcttcggcatttcgtacggaaccgtgttttccccgtgctccttgagtgcgacgacctccgggataatctcccccgccttgcgcaggatgaccgtatcgccgatgcggatatccttttctttgataaaatcctcgttatggagcacggcgcgcgtgacggttgtgcctgcgagcgtcaccggctcgaaaataccggtcggcgtaagcgcgccggtgcgcccgacgttgatttgaatgtcaagaagctttgtttctttttcctccggcggatatttatatgcctccgcccagcgcggaaattttgccgtactgccaagctcccgcctctgttcaaagctgtctaccttgacgaccgcgccgtcaatttggtacggcagggcgccgcgcatatcgccgatacggcgtatttcttccagtacgccgtcgatggaatcgaacgtcttataaaaaggcggggcggggaatcccagctctttaaggaaatcgagcgactgcttatggccggtgagcgtttcgccttcgatttgctggatattgaacacaaagatgtcgagcgagcgctgtgccgtaattttactgtccttctggcgcagggagccggcagccgcgttgcgcgggtttttaaacgttttttcctcgtttagctcctgcttttccagcagctttaaaaagctgtcgttcgacatatagacctcgccgcgtacttcaatgtacggcagcggctttttcaggcgcttcgggagcgagcggatagtcttcaggttgtctgtgatatcctcgccggtcacgccgtcgccgcgcgtagagccgcgcacaaaaattccgttttcgtattccacagagacggacagcccgtcgaattttggttctaccacgtatatgggatgctccgccacgccgcgcaccctcctgtcgaaatcgcgcatttcctcatcggaaaacgcgtcgtgcaggctttccatcgggacggtatgcgttacgggcgcaaatttttccgcagcctttccaccgacgcgctgcgttggggaatcaggtgtaataagctccggaaactgttcctccagctcctccaggcgctttaagagcatatcgtactcataatcgctgatttcaggcgcatcctggttataataccgttcgctgtggtaatcgagcgtttccctcagctttgacgccttgctttttgcatcctcaaaatccatataatccacccatcaaatatgattttatttttgcggccggtacatccacggcataagcctccaggtcagcatgttcttccttaatttattgggagtgcctttgccggatatgagcaaatcttcaaagcccttgagctttaccgtattgcggaccgcgctgtagccgagcccttcgcgcagaagcaggtcgatacagtcaaacactgcctgcggaagcacctcgtaagtaaacagggcattgagctttttattatcgggataagccagggcggcctcgtccctgatgcgcagcagcgcttccacacggtcaaagcatatgatgccaaccggttcctgcgccgccgcgggcggctctaaatccctgctgcgattcattacggcgttcgactggaaattccggtctgttttgagcagaagacggtagataaattcttcagcatagccgtaacggcatttttcatcaaacgctaaatgattatttgacagaaaatcacgcgaaaacatcaccgcgccgatgtcgatattgataatgcccttcacaagccccgtaatgagctccgttcccttgattgcacccgacttcagcgccgctaccagcttttcattgctgcccggcgcgcagccgtaaacaaaatccgcattgctgcggctggctgtctgataataatcggttaatacgccggtataaagcctgcgcgggaacaagaacgttacatagcggcctgaggatttgtaaattcctgtattgagcgcacaggcaattcctgaatccccgttttcgacgacaaagccgcgcaggctgtgcatcttgattgttttgagtgaggacagcatggttttatctgaagaacgcatgtcgacgacaatcagttcaaagttgatgtcttttgcctgttcggcaatattttttaaaattgcggaaatatgcttatctatattttttaccggtatgacaaccgatacatccacgtcaggcaaaaaaagcactcctttatcattttgctccacaggcgcgaaataataagccggacagcgcgcctatgtaaaatagtttacccccaaataaaggtaaattcaaggaaaaaatagaaaagatacagaaaagacgcttctgcatatttatgcacttctcgtgaatacgcacaattctaccgcatgtattcaacctccgagcattgcagctttaagaggcggttcctgcaaaacccaaatagataatacagggtgtaatccgctatttcttgggaaataatttaccgtccgtataacttctccagtttatgcctatcccgcaataaaaaaacgccccgtttccggggcgcgtaaaaatttaagcaaattatctttttgttacagccgaggtgtgcttttccctgaggtatgtagattccaaatcggccagatggagctttaccgctatggggtatttttcataagcaaggcttacggagaaaccgccgttgtcgtcgaatccgcccatatgccagcggattgccatcgcctcgtcaattttcagccgcatgaagcgttcgattaaaaagacggatttttcaccatgcccgtagggaaagctatcctccacgctgtaatagggctgcttttcccactgccccgtctcgtcgttcttgacgttgcgggttgataccttataaaactgcgccttgcataaatcgtgcagcagcgcgcagacagcaaagctttcggggttatccttttccccgtcaaaatgtttttccataagaacgtgatatacgctcaggctgtgcataaccagtccgttttcacaggcgcagtggtatttcgtactggcgggcgctgagaaaaaatctgtcttttgcagccattccaaaagctccctggagcccggccgcttgatgttttcctgataaatctcaataaattcttctttaaatcccacttgctgctcctttcccgaaggcacaaggcaagcagagcgcgccctgccctcccgtaccgaatattttttccagcgccgtacaggcgcgccgggcctttatccgtttacccctttacagggagataaacatccatataggttacgccttctttttcatagacctcttcaaattcaaagcaaacgcggtcctcgtaacccggcatttcaagattgttttcttttatgtagccaaataatttttggtatgcttccggaatcgttttaaacgcgtcgaaaaacgggtcggtaatagtaacggccgcatagcgccccgtttcctgaaaagccagttgcgcgccgcagcacgcaggttcaaagccctccggaataacataagcagagacatacccgcgcaggccgaacttttctctctgttcttccgacacaaacggaaagttccagccaatccgtttcggcgtgtagcccggataatcaagcaggccgctgttttttgcccatctttccatataggcattcacgtcgtcttccgggttggggctgataatgacgtaaagcgccatgcgaaacccttccactgtttttacggtgataccgctgtaacttccggccattttatgcctcctgttattttataaaagctccgggttatacaccgcgcgttcaccgccgacgaatttcggccttgtgcgcgcgcaaattaaaaccgcctcaccgatttgcttgagcgacacacgcacgggaaccgccgtcctttttaaatgcatgccgatgagtacgccaccgatgtccatgcccgcgtccgcctttattttttcgacggtacacgcgtcgtcaaattctctgtaagcagtcgtcgcaaaggaaccgccggccttcggctgcggtacggcgtttacaattgtaaagccaagcttttgcgcgcattccttttcgacaatcagcgcccggttgagatgctcgcagcattgcgcggcaaggtaaatcccgttcttttttagaaccggatacagcccgtcgaataccgcctgcgccgtttccacgctggaattggtaccgagcctgctgccgcagatttcgctgctggagcagcctacgaccataagcgcgccatcttttatcttcgcggccgcgataagctcttccgccgcaatttttgcctggtttgtaatttccttcagcataatataaccgcctcgcttcataacatttgggattgctactattataccccttacggcggtaataatcaaacggtatgcaccgaagaaaagcgtatattttcccgtatacgaaaaggcgcggcagaagaccgcgccttttatggcttgtgaattaaaattattctgccgttccctcagcgggagcttccgccggaggctcggaaaccgcaacgacctcgtcctcctgcgcagcctgctggccgttttccggctcgagaagcgcgcgcatggaaaggctgacacgccttttttcaaagtcaatcgccgtaatcttcgcattgacgacctgtccgacggtgagctcgtcctgcggtttttcaaccctgtggccggcaatctgggaaacatggatgagtccgtcgatgcccggcaggatattcgcaaaagcgccgaaggaagtcataccgacaatcctcgcttccacagccgttccgaccggatattccttttcaagcttgacccagggattgtcctccgtctttttatagccgagagaaatgttgcccttttccgtgtcgatgtcctttacgtaaacctcgacggtgtcgccaacgtttacaacctcggacggatgcttgatacgcgcccaggaaagctcggaaatatgaatcatgccgtccactccgccgatatctacgaacgcgccgtagcttgtcagggacttgacgactccggtataaaccttgccgatttcgcaggtcttccagaattcttccttcagcttcgccctttcctctttgaggacgccgcggatggagccgaccgcacgcctgcggcccttattgatgtcgataatcctgaagcggacttccttcttgaggaggccttcaagcggctcgcctcttgaagcagtcgcctgggaggctggaatgaagattttcacgccgttggaaacgcagatgacgccgcccttgattacctctgtaacaacgcctgtcagaatggcctggttctcttccgcctcgacaattatatcccagcccttgagcgcgtcgacacgctttttggagagcgtaataacgccttcctggtcgttcgtgcgcataatgagcaaatcgagaacgtcgccgattttaacgaggtcttccgttttcgcgttcgggtcgtttgtcagctcgtcgagctttacgacgcccgcctgctttctgccgacatcgacaaaaacctcgttgggagtgattctttcaacgactccctgtaccctcccatctgtattaaagctcttgaggttctcctcgagcatttcagcaaagctgttttcagaattgtcaactgttgtttcaccggattgcgtgtttaaaacgtctgtcatcttatccagtacctcctttataatcctcgccggtgccgaagccccagccgttacgccgattgaatgcgccttttgtatctcccgcacaggcaggtcattacttgtctgcgcaagccaggtgttaggacagcgctctttgcaaatatcgtataatttgcgtgtattggagctgtttttatcgccaattacgaccataaaatcagattgctccgacagagctttcgcctctgactgtctttctgacgtagcactacatattgtatcaaaaaaagtgggatttgtatataccttttttacagtttctaaacattttttccattgagaaacgtcaaaagttgtctgtgcgacaacacagatgtctttatttttcaaataaggaaatttaactgcaagttcttcaatcatcgaagggctgtcgagcgtaaagtagccgccctcgcaatgcccttctacgccctgtacctcaggatggtttttgtcgccgataataaaaatggtttttcctgccctggattcccgcgcgaccgtcctgtgtattttggcgacgaatgggcaggtcgcgtccgcgcagtcgagcccgagttccgcaatctggccataaatgctttgcggaacgccatgggaacgaatcacgaccgtgcggccttcctccacatcccctggttcgtccaccgttcggacaccgcggcgttcaagctcctcgaccatttctttgttgtggataatcggcccgagcgtacagacctttttattttcatccagcaggctgtataccatattgaccgcccggtttactccaaagcagaagccggcggattttgccaaagtaattttttgaggcagagactcaggcacaatagcaaatcctttctaaaaaacggaagaaacggctgtaacgttaccagccgtttcccaaaatttaaaattagatagaaatatccatagcaacgttgtaaagctctttattgaactgttttttcatattgagcgcttcggtaatatcgaaatcgacaatcttgccgttctgcatggcgacaaccctgtttcccacgcccttttcgagcagctcgaccgcacaatggcccatggagcttgcaacgaccctgtcgcgaagcgtaggcgaaccgccgcgctgtacgtggccgagcacagtcgcgcgcgtttcgatacccgtttcttcctgaatgcgcttggcaatcgcctcaacgccgcccacaccctcggcgactatgatgataaagtgttttttgccggagctctgcgtaaagcgcatgcgctcgataacgtccttctcgatgttgtagggcatttccggaacgagaatcgccgtagcgccgaccgcgatacccgtttcaagcgcgatgtccccgcagcgcctgcccataacctcaacgacgctgcagcggtcgtgcgactgggctgtgtcgcggatgcggtctaccatttccatcgcagtgttcatcgctgtgtcgaagccgaccgtatattcgctgcacgcaatatcgttgtcgatggtacctgggattccgacgcagaggataccctggccggtaaggtcgcgcgcaccgcggaatgagccgtcgccgccgatgacgaccacgccgtcaacaccgagcttgtggcatgtttcggcagctttttttacgccggccggcgtgttgaattcttcgcttctagcggtatagagagtcgtgccgcccctgtggattatatcagaaacactgcggaggttcatctcaaagacgtcgccgttcaagaggccgttatagcccctgtgcacgccaatgactcgcatgcccttcgacagcgccgtcctggcaaccgccctgacggccgcgttcatccccggagcgtcaccgccgcttgttaatactgcaattgatttcaccgacataacaaattcctccgattgtaaaatttcgctgtctatcattatagtaaaagcgcgtggaataatcaagccttttttctttattttaccgaaaatttgctaaatttttaacaatctgccgcgcctgctgtgaaagctcacttaaccgcgacattgtcctccccgatacgccgtttcagctcgtttatcatgacgtcgttcaggtccacccacatctgcgcgggcgcgcgcaggcgcttgcccgtgtcggaaagtacaaatacgacggggcttctcccctcgtcgaaaatatcgagcacctgtctggcgcgctcatattcttcgcactccatatttttcagccgcaggtaaagcacgggcaccgtgcttctttgctgtccggcgctataagccggcttcctgttcgcttctggcggggtatggccctgcgtgtccctcggcacctcttttgaggcgggctttacctggttgcacaggagctttggctcttcttcctcccgaaggcttacgcctgcaagcacatcgacgacgcttccttccagaaaatatgtgccgtattccgcaagcgtctgcggaaagacgagcatttcaatcgcgcccgtcatatcctcgagcgttacgaacgccatcatggaattgtttttcgtcgccttcagcttcaccctggagatgattgcaagcacacggacgcgcgcgccgtcctgatagcggctgttctgcgcgccttcgctttcgagtatctttaatatctggtcggcctttacagcctttgacgcctttgcatactccgccataggatggcccgacaggtacatgcccgtgacctctttttccatggcaaggcgttccgtaatggtaaagtcgtcgaggggctcgagctgcggctcgccgcttccggccagctcctcactatcgaagaagctcagctgtccgtccatattccggcgtttatcctgctccaggccgtcgagcaccgtcttgacgcccgacagcatttcgcgccggttgtgtcccatatcgtcaagcgcgccgctcttgataaggctttccacggcgcggctgttcatccctttgccgtaaaggcgtttgcagaaattataaaacgaggtgtatttcccgtttgcgcgttccgcgacgatttcatcgataaagctcctgccaaggtttttaatcgccatcagcccaaaccggatatcatcgcccgatacggtaaacccgtcggtactgatgttgacgtgcggcggcagcaccttaatgtgcaggcgctggcactccgccgtgtaagcggccagcttgtttgaattgtcgagcacgcttgtaagcagcgccgcaaggtattccttcgggtagtggtatttcagccatgccgtctggtaggcgatgttcgcgtatgccgccgcgtgcgacttattgaaggcataggaggcaaagctctccatttccccatagatggaggcggctgttttctcgtccacaccgcggcgcaggcagccctctacctctacctccccgttttcgtttaccagcccatggataaaaatctggtgctcgcgctccatgacgtcctttttctttttggacatggcgcggcgcacaatatcggcgcgcccgagcgaatagccggcgagcgtgcggaaaatctgcatgacctgctcctggtagacgatgcagccgtaggttacgtccaggatatcctttaaaagcggatgcttataggtaaccttttccggatgatgcctgcactctatataccgcgggatggaatccatcggccccgggcggtacagcgagataacggcaatcaggtcttcgaccgattccggtttcagctggacgagcacgttcctcatgccgcctgattcaaactggaacacgccctctgaaaacccctgtgaaagcatttcaaaaaccgctttgtcgccttcgtcgatgtcagcctctgtaaaagcggggttcgatttcagtatcattttttttgcgtcgtccagaacggtcaggttgcgcagccccaaaaaatccatttttaaaaggccaagctcctcgagcgcagtcatcgtgtactgtgtgacgacggcctcgtcgttcttggcaagcggcacataatagcttacgggctgttcggtgatgacgacgcccgccgcgtgggtcgttgcgtggcgcggcatcccctcgatgctgcgcgccatgtcgatgagctttttaatctgctcatccgtatcgtagcgttcctttaaatcctttgaaacggaaagcgctttgtcgattgtcatgcccaaatcggccggcacgagctttgcgacgctgtcgcaaatgttatatgggatagcaagcgcgcgcccgacgtcgcggattgcgccgcgcgccgccatggtgccgaacgcgataatctgcgcgacgtggctttccccgtacttacggatgacataatcgatgacctcctgccgcctgtccttgcagaagtcgatatcaaaatccggcatgctcacgcgctccggattcaggaagcgttcaaacagcaggttgtatttaatggggtcgatgcccgtaatgccgatgcagtaggcggcaaggctgcccgcgcccgagccgcgcccggggcccaccgggatatcctgcgattttgcgtactgtataaagtcgttgacaattaaataataatcgacatagcccatctcccgcacggtttcaagctcgtaatcgagacggtcaaacagctcccgcggcgggttttcgccgtaatttctataaagcccgtttacgcactgctccttgaaatattcaaaatggccgcgcccgtccggtacgtcgaaatgcggcagctttgtctttccaaactcgaattccacattgcagcgctgcgctattttgaccgtgttgtcaaacgcctccggaacctccgggaacagcgcgcgcatttcctcttcgcttttatagtaaaactcgtctgtcgcaaactccatgcggtcttcgtctaaaaccgtatggtttgtctggatacacaggagaatccggtgcatctcgctgtcctctttatcgatataatggctgtcgttcgtgcagacgaggggaattcccgtttcctttgctatctgtatcagctggggattagtcagcctttgctcctcaattccatggtcctgtatttcaatataataattgcccttgccgaatacgctttcgtaatagagcgccttttgctttgcgccctcgtaatcccctgcaagcaggcggcgcggcagctcgcccgcaaggcaggcggaaaggcagattaggccctcgtggtattgctcaagaagctcgtcgtcgattctgggcttattataaaagccctccgtccacgcctttgacaccatggcaatgaggttctggtagcctttgttgttctcacacagcagcaccatatggcggctttcacggtcgaactcaggcgttttgtcatggcgcgagcgcggcgcgacgtaggcttcgcatcctataatgggcttgacgccttcttttttcgcaattttgtaaaactctaccgcggcgtacatattgccgtggtcggttacgcatacggcggggaaatcgtgcttcttcgccgcctttacaagctttttcaggcggcaggcgccgtcgagcaggctgtattcactatgtacgtgcaggtgtacgaacgccatatcctccactccccctattacaacgtcctgcagaagcctacagcgcttccgcgatttccataattctctgtatcctgtggttcacgccgctccggctgattttcggcgtaagctcctgcccgatatcgcgcagggaatattccggatattccagacgcagaagcgcgacctgctttaaatcgtcggaaaggctattgagccccttgcatctttttattttttcgattgcctcgatttgcagcgcggcagcctgcgccgttttgttgatattcgcgatttccgagttcgttttcctgttggttttattgcgtaaatctttgtaaatcttcgcctgcataatagtcatggacgccatcggcgcgccaatcaaggtcaaaaagtcggaaatctgctcgctgtcctttaaatatgcgataaagctgcccttccggttaaccgtgcgcggctccttcgcaaactccgtcgcctctgaaatcagccggcagaggtcggcgcacaggtttttataaggcatgctgaattccaggtgataatccttttcgggattaataaccgtaccgcagcagaggaatacgccgcgcaggaacgcgcggacactcccctcgtcatccaggttcgcgcggttgacgcgcaggctaagctctcgcgtactgtggccgaggtcagtaaaaatccgctcgcattcgtacgaatccggtactgtaagcgtagacaggtgcgtacccgtccgtttgccagtgattgcggtttttttctccgtaatcacctgccatacctccgcaagcaattcagtaaaacggtttgcgacatgggtattttccgtgctgaatataatactgtcctttgaaaatttttttgcaaacagcaaatagccgtaggcctccgcccgtttatgagaaagcgcggcgtcctgcgccgcgcaaagctcccgttttgtttcaaaggcaaatgacataacgccgcccgcccctctttccgtatttttgttgcgttacgctttcctgatatccctgtggtggatgctcgctcgctggccatgctccgtcaggtggctgaacagcagctttgcaagcgttacgctgcggtgcttgccgcccgtacagccgaacgcgatgacgagctggcttttgccctccccgatataaagcggcagggaataatcgattaaatcgagtatcctccccaaaaggccctttgtctgttcccatttgagcacatattcgcgcacctcttcgtcaagccccgtcttgtgcttgagttcctcgatataaaacgggttcggcaggcagcgcacgtcgaatacgaggtcagcctccggcgggacgccgtatttaaagccgaacgacatacaggtaacggtgagcgccatattgttatcgccgagaaacaacgtggagacgcgttccttcagctgtgccggggacaagagcgtcgtgtcaataacatagtcggcgtgctccctgatgcttttgagcagctcgcgctcaagattgaccgcgtcgagcgtagagccgcggtagttttcgctcagcgggtgctttctgcgcgtttctttgtaacgcgtgagcaaaacgtcctttgtcgcgtcaaggaataaaattttaaacgcctttttttcgctttttagctttagcaggatttccgtaaagctctggaaatcctcccccgtgcggatattcgtcacgacggatacatgcttcatgcgctcctcagacgagtttttgcacaggtcataaaaggtggggatgagtacaggcggcagattgtcgacacagtaaaagtcgatatcctcaagcgcgtgcagggcaatcgtcttgcctgcgccggaaaggcccgtgataataacaaactccatttgaatcatcccttctgtgattcggcgctattccccgataaacctgatttcacattcaagcggtacgccgaacttttcaaacactgtcttctgtatatgctcaacgagagacttgacgtccttgctcgccgcgtccttcctgttgataataaagcccgcgtgcttttcgcttacctgcgcgccgccgatcgtaaagcctttgagccccgcctgctcgataagcgtgccggcaaaatagccctgcggacgtttgaacacgctgcccgcgctcggatattcgagcggctgcttttctttccttctgttcataaaatcgtccatgcgcacacggatttccgtttcggaatccctgcggagctttacgacgacccccgtaataatataaccgttctctgtataaatactgtgccggtaagaaagcttgagcccgtccttttcaaagctgccgggattcccttccggcgtgacatggtggcagcaataaaggacatccttcatttcgccgccgtaggcgcccgcgttcatgaaggcggcgccccctacgctgcccgggattccccacgcgaattccagaccggaaagcgaattttcacaggcaaaggagcaaagcctcgcaaggcttacgccgctgccgcagaaaatggtatcgtcgtccacgagggaaatgcttttaaagttcccttccagcttcaaaaccacgcccttgattccattgtcggatacgacgaggtcggagccgcggccgagaatgaaaaggggcgcgttctcttctttgcatgccctgagcacggcgcaaaggccgtttaaatcgtttgcgataaccagcagctcggcacggcccccgattttaaagctcgtataaggcttcatcggctcgttttccctgacggtacagccgtgggaaagcgcgtgctgcctgatatgggtaagattatacatggtatcctccgagaagctatgtaataccgcgccgcgcgcggttcctcatgtcaaggatatgccgcagctttgcagataattcataaagagctgcttgtccgaattcacgataagctcgtgcgggaagccgatttcgtcgagcatctcaaggctttcctcgcacgcgccgaccatcgtggaaaaatgcgcgtcggaattgatgatgattttcgcgccgtactttttgcacacctttgcaatctcaatgcaattggctgccgattttttacggaaacggaaggtgccgttgttgatttccacaagcttgttgttcgccgcgaactccggtatgaccttttcataatcgtatttatattcaggcgtgccgctgtgccctatcacctgtacgttcgggtttttagcgatattgagccacgcattggtgcaggcttcaaagctgggttcgccgcgtactgttacggaatgtatagaagcgaccacccagtcaaggctcctctgtaaatcgggcggaacgtcgagcgtaccttcgaaatcaatcaaattggcctccacgccctttaggacacggacgccgtacagcgtagacgggatggtatgctggctttcaaaataccatttccccggcgagccgggcattgcgtaagcgtggtctgtcaaagcgattgcgtaaagccccttttcagaggcggcttttaccatttcctgcaccgtgctgtaggcgtgcgtggaagcgatggtatgcgtatgagtatctgcgattactttcatggcttcattcctgatttctttatataatattacgggcgttacggttcccagtcgattttattcttaccgctctcctgatctacggaaatttccatcccaaggctctgcaaaagctcctgcgccgcgttataccccatctttttctgcctgttgttcatggcggctacctctatgatgattgcaaggtttcttccgggttttacagggatagtgagtaccggcacgttgacgcccaggatttccatatactcgttgtccattcccatgcggtcgtagaccttggagctgtcccatatttccagattgatgacgatatctattttttccgtcagcttgaccgcgcccataccaaagatacgccgcgcgttgataataccaatgccgcgcagctcgataaagtggcggatattttcaggcgacgagccgacaagcgattttttggagacggcacggatttccaccgcgtcgtccgcgattaagcggtgcccccttttaatcagctcgattgcggtctcgctcttgcctacgccgctgtcgccaatcaacagcacgccctcgccgtacacctcgacaagcacgccgtggcgcgttacgcgcggggcaagctcaacattcaggtacgaaacgagcgcggcgctcaacgcggacgtagcgtcagcgctggtgagcagcgggacctcgtactttttcgccgtgtctacaagctcagggataggttctatactgcgcgcgacaatgattgccggcggtttcctcattaaaatatcttccaggatttttatcctgtggggctgctcgcactggccgagataggccgtttccgtattgcccatgataatgatgcggctgtcgtcgaaaaagtcgagaaagccggtcagctcaatcccaggacggttgacatccctggaggatacaagaattttttccggcgcctgcggcatataggccgtctcaagggagagttccttcatgatgcttgcaagcgaaacagtgaaaacgggagccataaaatcaccctttataatttggttagtcccattataccgtaaatctaccgcttttaaaagggggtaaccgcacaatttttggccttaatttatcttcaccccggcgctcacctcataccgcgcgtctttcagtgcctgcggcacatcatcaaggctcctgtagtaatccccgtcaagctgtatcaggcgcttggaaaagccgaaaatatccgccccgttttccatgatgctggttttgattgttttctcacacagctttttcacgcgctcttctagcgctgtctttacactttctttttcacgcgggggaatataaacgtctgccgacgcctttattttaatgcggaacgtaagatgcccgccgtctataacaggcgtaatttcacttttgcagcgggagagcgtaaaatcgatattgccgctgccgtttccctttaagataagctccgaagcggtatccgcttttccgctgattagcagcgcgccaagcgactcctcaggcgtaagcgaaaacacatagcggtcctttgcaaaaacggctgttcccgctgttcctggctctttcccgtcgagtgtaagcagggaggttttcggtgataaattcccgctgatacggtctgattccatctgcatgagcgtggatacgaccgtcctgccgctttttctctcactctgtgagatggtatcgatttgctgcggcgtaatttcttccgcggtcaaaagagcttccgctttattttcacaaacgaatacattgacatttgggcgcgcctcatagtaggttgtgaagaatgaaagcgcctcttcaaaccctgtttgggccgttttcattccgagcagcaaaaacaggttctggctgtaaagcggctctttccctgtctgcgagatgctgttagccattgcgtccattacgctctttccctttgccatcaggaccttgaccgtttcctcctcagtggagctctccgtgtcgaggtacatcagtgtaaggcaatagccgccttcgtcctccctgtctatgccgataccctggataatcaggcgctcactcagctgctttgcccctgtacagccggtacaggaaatcgctacgagtatggaaagaaccagtgcaagacactttttcatgcgtgtttcccccttgttttcctggacagaagtacgagcagcggcagcaccacggctgtcagcatagtaaacgcgagcaggatattattgttaaacagcacgcccatcaccgcgtttgaggccgtaatgccataggtcataagcaaaacgaccgcgcctgtgacgagaattgagatgcgcgaggccttttcaccccatatttttttcacacaaagggacacaagatataaaaacagcgcgcatttgataaaaatacctgccgtccaaacgcccaggaataccgcgtccatccgctggaaaataccgatttgcgcaacgcttgtggctgtataaaccggaaagggctgtgttacgagatagtcgccgaggactcctacgacaagcaggatgacaagaatcgtcgagccgtatatgccagcgcaccaccagccaatccccttctttacattacccttggcaaacggcagaagtatcgcgagcgccggaatgcaggaattgcgcgcaagcatcagcagcacgccgtttatcgtaccgcccgccccctcgtaaaagaagggcttgtaattgagcgggtcaacctgcgccgtcagcgcgcaaacaagaaagatgaacgcggcgagtattgcgaccaggacaagccccgaagtccttcccagcgcttcaatccctttatacgccccgtaaacggaagccgcgattacaccgagcgaaagcaccgccgccgaaatcttggggttcatcaaatctgttacaaacaggtcgaacagcgaaagcgtatagcacagcacccaaataaaataaagggcgtagataaccgcaacagccgtgccgagctttccccacgcgctgcagccctggtcaaggatactgtgcgacgggctgcgcttataaagcagataaacagggataaccatcaggagcgtcaggaaaaacgaaatgacagccgataccaggttatcccacatttcagaagtttccgcgatataaaggctgtaggtgatgttgacaatcgtccggctgataaaaagcataacaaaaagctgggcggccgatatggtgatttttttttctttctgcacagaaaggtctccttactctttaaactgttcgctgccctttagctcctgcacaaagttccgcttttgggacagcgtcttccagccggcgcgtatgaatacgtcgcgcatgccaaagatggaaaacggcgcgaccggagacacatacggcacgccgaagctcagctttccgcagaggttaataagcacgacgcagaacaggaggataatcccccatacgccgccgaagccgccgacaatgataaacaggatgcgcagcaccgcgaccggcgggtaaaggtcagggatgacgtaagaggaaatcgccgtcagcgcgacgaccatgagcgtcggcgctccaatcagccccgcgtttacggccgtctccccaatgacaagcgctccgacgatgctcaccgcgtggcctaaggggcgcggcaggcgcaggcccgcctctcgcatgatttcatagatgaagtggatgacgagaacctccgccatcagggatagcggcgtatccgcaatggaggtcgcaaccttgctcagcaattgttcagggaaaagctcggggttgaacgttgcaaccgccacgtaaaaaccgggcgtaaaagttgcgacaaagaacgcaaggtacttgagccaccttgtaaatgtggcgaagtacggacggtttgagtagtcgtcgagtgtctggaaattttcaacaaaaagatgcggtacaatcaggacgctcggcgtaccgtcgattaaaatggcaatacggccttcatttattttgccgcagacggtatccgggcgttccgtaatgccgattccgctgaatagggaaaaatcgccctggttttcaaggtacggcacaaggtagccggaagcgagcacattgtcgaggtcggcatgcttgagccggtccttgagctcgtttaaaatccccttcgaaacgcttttattgaggtaaaccaggcacatatccgttttgctcaccttgccgacggaaagcgtctcgaatttcagctccggcgttttcatccgccttcttatcagcgtcatgttgatgcgcagcggctcaacaaagccctcgcgcgagccgcgctgtacgacctcggattccggttccgatacgcttcggaagctgaacccctgtacgccgatggataacccgatttcagcaccgtcgataagcagcacggcaaagccggacataataaaggtaagcagctgttcaaacgtatcgatttgcgtgatttccgaggcggaaagcacgctgtattcgatgtatttgattttttcttcgcctgtttccccctcaatatcgcttaggataatcgggtttgcaatgctgacggcgagcgtttctttgtttgtcatgccctcgattgtcaaaatcgcggcccttgtaccgtccttgagcgtcatattgcgcacggtaaagtcggcgctcccgtcaaaggaatgctgcaggtattccagatttcgctcaagcggctcatacagcttatgcgtcttttgcggcgggatatatttcgggccttccggcgtaaaaacatgcttcagtttattcataaaattcatttaatcaccacaattgcgtccattctcgtaaacttcctcttactaacttttgcagatgcgctttgattattcgcataatgggaacgtacaggttcaaaatatgtaatggtgattagaatgataatatcaataataagaacgcttttgctctatcttgtgattattacagccgtacgcgtaatgggcaagcggcaaatcggggaaatgcagacaagcgagctagtcgtaacgcttttgatttccgacattgcggcaatccctatgcagaacacctcccagccgcttttaagcggcttcgtgccaattctgattcttgtgctctgtgaaatcgtgctttcgattgttatgatgaaaaaagcaaaattccgcaagcttatctgcggaaaacctcagattgtgattaacgatggaaaaatcgatcaggcccagatgaagcgcctgcgcatgagcacggaggatttgtgcgaacagctaaggcagctggactgctttaacattgaggatattgcttacgcgatagtggaaacaaacggaaaaatgagcatcctgaaaaagccggaacaggacacgcctacgctttccgacctgaagataaaaaaacaggacaaaggaatcgaagcggtcgtcatcagcgacggggaacgctctgactattcgatgaagctttgcggcgtggacgacgactgggttagcaaaacactcaaccaaaataaagtggaacagaaaaacgtctttatgatgacggcaaacaaaaagaaggaataccagattattctaaaggagaaggcaaaatgaaacgattgtgggtagcgctcataattgccgtacttgccgcagggctttgcaccgcggaaatgatatacacgctttccaaaacaaacgaggcggaacggggcgtttcgcaggcggtgcaggcctatcatgacggcgaccgggaagaagccgcaaaaagaatcaacaagctcagcgacgactggaatgagcagcaaagctttttaaatgtgtttttgtatcatgacctagtggagaatattgggatatcgctcggcgccgcgacaaagtatattgaaacggacaacagtgaatttgttgtagaatgtgaaaaagtaaagcagctcctgcgcgccatgaaggacgcggagctgccaaagtttgaaaatattttataaaagccaggtttaagagaaaaaagggccgcgggcacatgtatgtgcccgcggccctttttctataaattaaaatcaactatgccttcttgattttacgccgaaggaggctcgcaagccaaaagagcaggaacgccgcaatattggcggcgacgatgctcgcgcccgtcggtgtttcgtataaaaaagacgcgctcatccctactacaaagcaaatgacagaaagcacggcggagcataggatgaccgagcggaacgttttgcacagccgcatgctcgtcagcgccgggaatataatcaggctcgaaatcagcagcgtccccataatgcgcataccaaccacgatggtaagcgcggtaagcagcgcgataaccatattataaatatttgccctcgtccctgtggccctggcgaagctttcgtcgaacgtgacggcaaaaattttatgatagaagaatacaaaaagcacaataacgaccgcggaaagaaccaagctcaaaacagcgtcctgctccgtagttgcgaggatgctgccgaacaggtagctgttgatgtcggtgttcatccccttgttgagcgtggcgataatcacgccgatagcaagcgcgctgcttgaaatgatagcgatggcggcgtcgcccttgattttgctgttctcgctcagccgcagcagcaaaaaggccgcgacgacgacaatcggaattgcaacctcgagcggagcgaggttaagcgccgccgcgacagcaagcgcgccaaagcccacatgagacagcccgtcaccaatcatggaatagcgcttgagcaccaggcttacgcccagcagcgcggcgcagagcgccacagggattcctacaaggaacgcccgcgcaataaaggagtaggaaaacatctccagcaagctttctatcatattatccccctcctttactgcctgatttgcgaaatatggcttttgtcaccatgcgttttctgtttgtgtacacaaacttcacaattgcaattgtgcagcaggaaacggctgcccatttcgctgtgcatatactccgtggttttcccgtaaaacatttcgttgtcgcttaaatgcaggatatggtctgcgttttctacggcgcttacaatatcgtgcgacaccataatgatagtaatgccgtcctcatggttgagctttttgattatggtgtaaagctcgcccgtcgcaatcgggtcaaggcccgtcaccggttcgtcaagcaggagcagcttttttgtggcgcaaagggcgcgggcaaggagcacgcgctgctgctgccctccggaaagctcgcggtagcagcgctttttcaaagcggaaatccccagcttttccatgttcataagcacggcctgtttatccgcgcgggaataaaaagggttcatccctctttgattgaggcagccagacaatacgacctcatatacggaagcgggaaaatcgcgctggattcccgtctgctgaggcagatacccgatttcattctgccgcagcccgtcatggaattccattctcccgccggaaatgggatgcagtcccagcagccctttcatcagtgttgttttgccggagccgttttccccgacgatgcatagataatcccctaggtataccttgaaatttacattccggagcacagtattgccgtcatagctcatagaaacgtctttacaggaaatcagcgccattttgttttcttcctttcagaatacaaaatgtatatttctatacaattttacaatcagtattttcaaataacaaagaaatagggcattcccccaaaggggatgccctattagtataacattttccctctgcttgtcaaacaagccttgtcaaattatgccttttttgcgcccgggcgctgctgcgcctttttctttgccttgtggttctgccagttaacccagagcgggccggctatgcagatagatgagtagcagccggaaatgacgccgaccatcatcggcagggcgaaggtctggacagaggtcaggttgaagatgatggcgattacataaacgcaggcgattgccataaaggtggtaatcgaggtacagatggtcctcttcaggcactgggacgcactcttgttaaagagctcagccggcgccgccttcggacccataaggcccctgttctccctgacacggtcataaataacaatcgtgtcgttcagggagtagccgagaatcatcaggacgaccgcgataaagttactgtcaatcggcatcctcaggatgacgaaggtaaagtaaatcatcagtacgtcgtgcaggagcgcgagaagcgccataacgccggcggacaggccgctgattttcctgaaccggaaggttacataaagcaccatcaggatactggcaatcgcaaccgccgtcaagcacttgaggaagaacttccaacccatagtggattcgacggagttcgattcgctgtacttgaagttgttgtccgggaattccttctggagcgcctgggtaagctttgcctgctcttcgacgctgatggattcgttccccgggaactgtaccgaaacgatatagccctcgctcgtgtcggcgttctggtccccggcaatcaggtttttactgattgcaaaggatacagtctcagccgtttcgtcttgaagcaggcttgtcagctttgcctcgtcaaccgagccgttatagctgtattttacgattgcgccgcccgtaaactggatgtcgagctttgctccaaatacaaaattgcagacaatgccgatgacgaaaattgcaatagagatgccgaagaaaatcttctgatgtccgataaagtctaatacttttctcattttccagcacctccgaataaccattttttgcgcaggaacttatatccggaagaagagcggatcataaacctggaggccgcgacgccacagacgaagttcgagataacacccatcaggagcgtgtagccgaaggagtaaatcgtacctgtggtcgaaggtccgaaaatcatggaaaggatgttggtcggaccgaatacgagcagcaggataatcgatacgataacgattgtaacgttgccgtcgaaaatcgccgaaaaactgtttttgcttcccttatcgattgcgccgtcaagcgttttgccattgcgcagctcttccttgatgcgctccgccgtaatgatattcgcgtccgcgccgataccgatggacagtatcaggcccgcaataccgggcagcgtcatcgtgaagctcgggaatattgggaaataaccggaaatcgccgcgatggaaagtgcaatctgcccaaccagtgcgagcaccgcgataaatccgggaagcctgtacatgatgagcataaacagagcaatcaggataaaggcgataatacccgcgtaagccatcgcagccagcgaggaggagccgagcgtcgggctgaccgagccgaagcttgcggtctcaagctcaaacggcagggcgccggcgttgattttcgtcgcaaggtcggatgctgtttccgctgtaaagttgccttcgatcatcgcgttgccgtcagagatgacggaattgaccgtcggatatgaaatcatgacgtcgtccatccagatggataccgtctggccaacgtatttttctgtaatttccttgaaaatattcgggtctttgagcttcagcgaaacaatatatttcgtagtgccctttgtgctgttgtctacgccggcctgcgcgctttcaacgttgctgccgtccataagtatggtttccgccgtttcgccggtcggtgttttcatgattgggttcccgtccgcgtcgtaatcggtcgtcgcgtaggagttacccggccggaatgtaagcttggcggtagctgaaatctcttcaatcgctttctcagggtcgaagtccttttcgtcctccttccacgggtagcgtactatgatgcggtccgtcgagtagtccgcatagagttcatagtcggtgatgttgtttgaaaccagacgtgtctcgataatcgcctttgctgaatccaactgttcgtcggtcgcattgacgtcgcccgcgggcttaaaggtagcttccacgccgcctttaatatcgattccccatcgaatgtcccctattcctttgattaccgtcgactggatatcaccgttttgggtgtgaattccgaaaatcgccgtataaccgagcgcaaggatcaggagggcaatgacaggaaacactagctttggaactcgtttcatgcgtttatcctccaatacaaatttatccgtaccaaaaaaacaactctgttaagctgcgataggtacagacgtaacagagtttattatatgattattagtgataaaagtcaatgcgaaaaatggcgaattctacacgaatttaataaatttgtggaaataccatattaatttcgagtatttattggcacagaagcttctccgcggcggcaagcttgacgcacaggcagaataattccatcgccatattcagttcagcgaccggcgggaacgtcggggcaatacggatgtttgagtccttcgggtcttttccgtacggataggtagcgcccgcgccggtaaggacgacgcccgcctctttacaaagctgtaccacacgctttgcgcagccgccgagcacatcgacgcttacaaaatatccgccgttgggcgtattccactgggcaataccagtgccggcaagctccgcgtttaaatggctgagcaccgcgtcgaaccgggggcgaaggatttccttgtgcttctgcatatgcttttttacgccatcgtaatcgccgaaaaagcgcatatggcgcagcatgtttattttatcgtagccgattgtctggtaagtataacgcctcttaaatacggccatattcgccggagaggaggccatagccgcgacgccggagcccgggaatgtaatttttgaggtggagcagaacaatatcgcgaggtcctcgtttccgttctttttgcattcgtccatcaggctcaggagatggtcgggcgtgtcggtgatgtcgtgcacgcagtacgcgtcgtcccacataatgcgaaaatccttagcggcgggcttgagcctcgcaaagcgcctgactgtttcgtcggaatatgtgattccctgggggttggagtatttcggcacacaccagatgcccttgattgtgctgtcgctttccgcaagcctttcaacaacgtccatatcgggcccctgcggcgtcatcggaacgtttaccatctcgatgccgaaatattctgtaataccgaaatgcctgtcatagccgggaacaggacaaaggaacttcaccttttcctgcctgcaccacggctcgcagccgccgatgccggccgtcatcatgcaggaaatcgtatcgaacatcatattgaggctcgagttgccgccgaccatgatgtcctttgcgtccacaccgagcattttggaaaacagcgcctttatggaggggattccgtcgagcaggccgtaattgcggcagtcgacaccgtcccgtgttttgcactgcgccccgctgtttacgatgtcgagcatcgggagtgaaatttcgagctgctcttccccgggcttgcccctggacatatccagctttaaatctttggctttgaattcatcgtattttgccgaaagctcgcttttgagcgaggaaagctcttctttagacatacttgagaagcttttcatgatacattctccttctatcatatgcaaaattttcataaaaccaaataacattttaatacttaggagctggaaatgcaagtttaatttctttttcctgcaaatttgtcattctgctgtctttatattgcgaaaaaactcgattcttgtacagctttttataagctgccccattctattatgatatattgagctatctgaaattgtgcaaaaaaagcagccggaatatccggctgctggattttttctttgttaagacctgtaataataattgtatcccgattttccgcgggatttcccgtccacaggcttacagcctacttcaataaagccgagaatttggctgtcggcaagcttgatattttgaatcaggttctcgatatccccatgcgtggtggaacgctccctgaccacaacaacataaccggcaatataattcttaagcatcacagcgtccgtaactagccccataggcggcgtatcgaacaggatataatcgtaacgctcttccagcttttcaaaaatatccttcatctgaacagagccgagcagctctgacggattcggcgggataggcccggaggtgacgatgtcgaggcaagggagaacctcgcggttgattacttcgtcgagctgtttgaattttcctacaacctcggaaaagccggaatcgttgttcagcttcatcagattgtggatattcggcttacgaaggtccgcgtcgattaaaatgaccttctttcccattttggaaagggagatggccatgttggcggtcgcggtgctcttgccctctcccttggaccagcttgtaaacgcaatacacttgcgctcataggcggcaagggaaaacatcaggtttgtacgggcgattttatagccttcaattaccgcaaaacggctgttgtcatcaattacatttcttgttttttcaaaattctttttctttttgtgaaagttgattttcattcttttttccccttaccttccgcttcaatgtccgctatcccggcaaataccggaatttcatacattttgtaaaggtcgtcgccaggcttgacggtcgtatcaatcaattccaaaataagggcgattatgatggcaagcaccaggccgccgcctaagccgtaaagggtattctttttgacgtccggagaagaaggcgccgttggcacgttcgccttgtcggcagttatgacttttccgtacggaaaaaacactttataaagggcctgtcccgcttcgggaatcgcatttgctatctttgccgccagctctgggttcgcgcttgttacactgacgcgcaaaaactgggtgtcatccaccatattgacattaatcattcccttgagcgcgctgggagagatggtaaggtcaagatattcgataatcttattcatcatcaggtctgttttaaataaggtttggcagacctgcgcaatccgcgcggaaataacaatatcgttcgcacccgactttttcacttcgcctgaagcggtcgttgcagattccgtactgtccgattccccaggcaggacttccgaattcgtaagatacaggagcgtcgaggtcgtatacacgggggtaatcatatacgctgaatacaggtaaagaagcagcccgccaagtagcgtcacaataataataagctttacatgagcctttagcattttcaggatatcgctgatcgttatttctcttttcgtcatatggttacgaaatccccccgcagatataattactctttctatcttaccagaaatttgttttttttaagtcctgtaaagaaatataatctcacaagtttataatatccattcacttcgagaattattttgttgttttattgcaaattgtatgcttaaaaggggaaaagaatcctatcctcatgaaaaaacagggcggattccatccgccctgtttttatttctggtattagccaagcacgctgattaaaacgcccgcggcaaccgcggagccgattacaccggcaacgttcgggcccattgcgtgcataagcaggaagttggccgggttatcgcgttggccaaccttctgagagacacgcgccgccatcggaacggcggaaacgcccgcggagccaatcagcgggttcaccttgccgccggtgagcttatacatcagctttccaaagagcacgccgaaggccgtaccgaccataaaggcggccaggccaagcaagatgatgaatatcgtattcctgctgaggaacacctctccagttgccgtggcgccgaccgtaacgccgaggaaaatcgtgacgatgttcatcagctcgttctgggccgctttgaatattctgtccacgaccccgctttcccggaagatgttgccgagcatgagcatgccgaccagcggcgtcgcgtcaggcaggaagagcgcgacgagaatcgtaacgataatcgggaacaggattttctccagcttggaaacgggacgcagctgctgcatgacgacgctgcgctccttcttcgttgtgaggcctctcataataggcggctggataatcggcacgagcgccatatacgaataagcggcgactgcgattggacccaataagtgaggcgcaagcttgctcgtaacgaaaatagccgtcgggccgtccgcacctccgataataccgattgagcctgcttccgcgggagaaaagccaagcaaaatggcgccgaagaatgtaacgaatataccaatctgcgcagcggcgccgaggataaagctcgacgggcgcgcaatcagcgggccgaagtcggtcatcgcgccgatacccaggaagataagaggcgggtaaataccgagcttgacgccctggtacaggtaatagagcaggccgccgtttgtcggaacattgtaatacgactgcccgtctataatggttgtggcataagacgccgcttcccctccgtgctgcgccatatagtcgcttacaagcaccatgtcggtggaaggggcccccataattgcggggaacaggtttacaagcagcatgccgaatgcaatcggcagaagcaggagcggttcatactgctttttaattgcaagaaaaatgaggacgagagaaatcagtatcatcacgtagttctgccacgggagcgaggcaagacccgaggtgttgaacaggcctacgatggattcccaaaagccttgtaaaatttccatgaaacactaacattcctttccgatgtattgtctttgccttgtcaaaacggcctggtattgtccatcaggccggctgtgctccatacaggtcggctttgggatgaccttttgatgctctttaccgcaaccgcgtttttcccatacattgcatcaacggcggctgagattacagcgacgatttcacccgggatttcatcgggcgccgctttctcctgcacgggaacaggcgtctgcacagcctcctggctttgcagcttttccttctgcattttcttttctttcctcttattcagcgcattgtaaacgattgtgccgtagagcttgattacgcctatcagcaggaaaagaacaagaaagacaacaacgaatccggtaataaggagcgtaaccgcaagcatgatgttatccattgtacttaccaatcctttccggagtaaaaacctataccccgccattttaaatcaatttccgtattattataccccagcttttcccccatttcaataaataaaaacagtgaaatcgaagctgtccaaaactttggaaacttgtctaatttttcacaaatcgttcccgataattaatgcactattatagctgcacaaaaaaacaggcgtatacaagcagcggatgtccgcctttgcatacgccatatgccgcctgtttttgtaacgctttatttgtgtttacagacggcgtgccctatgtttatttttaaccttcctgtttttcaactttcttgattttaaagaatttgcgcagaaaaaatccaaggactgcggggctttccagtacgactaccttcataacattacctccgataaagtcagcatctcaaggttgcaaggccgatgccgagtacgatgatgacaatcgccgcgatacagattataaagcggtcgggaaaaaaacacgccgctatcagcccaaagccaaacgcgaccgctgtttttcctcttttccggtagcagttcatttccatcactcctcggcaagctttggccataacctccgcacggccttgttactgctttaatacagtatatacaatgtgtggaaaagtgtgacagagccggtattactgccttgcaatcctcaaaaggtctagtgtgtcgagaacaccgtcgccgttcatatcgcaggcaagggtaaaagggaacgcaagcttattttcccctaaaagctccgacattgcggcgcgcttatcgtttatattgacatttccctcgccagtcaggtcgcctgctataatcagaatataggcttctttgaccttaccgttcacatcgctgaaataggcggttgtccctgtgccgacgttaccgcttgttttaccttcccctttataattttcaaaggaaacatgatagccgccgtatgaaagattacgtttgaattttgcaatcgtcgtcccggcagctattccctgaatcaaaaatttattacggtcgatattatatacagaagacgttatttttccatattccggcggcaaagaagatgaagaagaaccgcctgcaggctgcgtcggctcctcttcttccggaatttgtggaatttcatttgctgaaaacaggtaaaacctgccgctgtttgccccatagccgccaagcatactggaggaagcgcacaggaaatcaagcttattgcttaaatcgagtgaacagacgcgctttccggatgagatttgatacccatcgattttcccaccggtggtaatataaaggttcccgccggcagccgccccgtttggcgtttcggaaaccataccggctgaaaacagcctgcgcgcggctgagccgttgaagcggtatacatttccttttttgtctgtcatcaggcccttgccagccgagtgcagcatatcgccagggacgccgtccatgcatttcttaagcgttttgccggaggcgtccaagtaataaagcgcatctgaagtcaagacaaacagcgtatgcagcccgctgtcgtaaaaaacttgtaggatattctccgggcagcctgctgtaaaaagaggcgcgcctccttctgaaaatacgcccagctgttccttttttgtatcatccaccaaataaaatctgccgccgccagccgcaaaccggttacctttcgcagcaaaaacgccatttataaaaacaatgtccgtttggccggtcgaaaagtcgtagcttgtcacgcttgtctgccttaccactcccctgccatcctgcgcggtaagccttgcagtaaagtaaacgcgggcgctgtccgcagaaaatgaaatacattcgttttcaagtacaagggaaaccccggccgacgagccgtcctcttttatatgctgggcgcgcacgctccggccagagacgccgattaaacaaaagccgttatccgcaccgggcagcaggctgcatttttccaatccgctgaattcaggcaaatcgatataggagtaagctctgcaggtatataccggcaaaaaaaggatggaaaccgtacaaatccataccaacatttttttaaagagcttcatgccgcaaccctcccggtttccatccattatttattataacgtagaattttttcaccggataaatcggtgaatttatttcaaaccatataatatagccaaaatgaaatagtgggttaaattcaggctttataacatatttaaaggctatgaagcagaaagccatttgatttaaaaccgcagcataaggtaaaaggaaccgcttgaaaaacgtatgaaatgtggcaagcatacggctcgtctgttgaaaaaaacaatcagttcggttaaaataagtaaaaacggaaaaggagcgctccatatgataaaaaaattgacagcaaacgcgagaaaaccgcaaggcctatggggaatccttatgataaaaaagatgaacaaagggcatttgcggatgacaaggtgggcgtttgagcatcttaatataaaacagggcgaaaccatcctggatatcggctgcggcggcgggaacgccgtttctatgcttgaaaagctcgctccaggggggaaggtttacggtatcgactattccgcgctgtctgtggaaaaggcggcggctaaaaataagaaggcggttgcgcagggcagggtcaaaatattgaatgcgagtgtttcttccctgccgtttcaggataaatcgattggccttgccaccgcggttgaaaccatttatttctggcctgatttgaaaaacgattttaaagaggtgtaccgcgtactcaaggacggaggccgcttctgtgtggtttgtgaaatggtaaaaaacagcgacggcaccggcgcgcatacacaggtcgctgattttttaaagctgcattacctgtctcaggaagaaatagagcggcttttcattgcggccgggtttaaaaatattacaatccgccgcgacgaaaccaatggctggcttgccgcaatcggcataaaatagaaaataaaaaaggctccccaaccgggagccttttcgtttatttatctttaagcagcttgttcagctcttccataaacgtgttgatatccttaaattggcggtatacggaagcaaaccggacgtaggaaacctcgtccacgtttttcaggagttccattgcatattcgcctatcagcttggaggtaacctccctgtcgagcgaattctggagcttgctctcaatgtcgtctaccatactctcaatcgtcgatatggataccgggcgcttttcacaggcgcgcaataggcctgcggtaagcttgttcctgtcaaaaacctcccgcgatttatcgcgcttgaccacaataaccggaacagtttcgattacctcgtgcgtggtaaaccgttttccgcagctgaggcattcccttcttctgcggatgcgttccccgtcgtccgcggggcgtgaatctataaccttgctttcttcaaaagcacaataagggcacttcatataataattcttccttccatgacgcatatctgaggacgcgtttcagccgtcctgtattttatatttcatttgaagcaattataccatatataggacagaaatggcaagcattccctatatatgcacattttacaaggttgaaacagttttttaagtacttattcacaagttgacgtcttcaaaagcgcattaatatgcttcattgctgttttaagctcaaggacttcaccaaagcttttcctgtaaacttcaatgataaaatctccgcaatacccaatttcccttagaatgctcaaaaccgcgcggtaatccatcgtccctttcccaggtaaaacacagtcgtttgcgggcgtattgtcgttcatgtggatatggacaagcccttttcccattgcgcggcagactgcggctgggtcgtttcccgaacggacggcctgcttgatgtcaaaaacaaatttggcgcgttcccccaaataattacgcattgtttcaagaaacgcagggtgctggctgcggaacatattcacgttttcctgcgcggccgtaacgccgtattgctccgcgcgcagggaaagctcgccaaacttttcaaaataatcttgatttgatatgccgttttgaggcgttttccggtcgccgtgtatgacgagcagctgcgcgccaaggtttgccgccgtttcaaaataacgttcataaaaatcgagcgtatcgcggaaacggcgcgtatagtcggtaaaaatcaaatacggctcatagcccgaggtaaacggatgaaccgatttcacagtcgcgtggtatgtgtccagaaggtttttcagccgcttgacaaacgcaggctcaatttcgctgaatgtattgaaaaaaatttcaaaatggcgaaagccctcttcgagaagcagctccaacgccttttccgtttccagcggataaaggcaggcggtagatataccggtcttcaaaaaaattcctccagtgatacggctgaagaatctcagtcataaaatgcgccgcattctataaaaaacggcaaaagggcgggtaccttttaagatacgccgccctctttatctttcgttaaacgcagacgtcagtccttgagcggaacgccctttccgtcaaccgcgatacttcccgtcagaatcatgatgccttcgacaagtccccagattgcggacacgaaggacaaaaagcctatagaaagaatggaaatgagaagctgcgcgactgcttttccggtatagccgagataaaaattgtggatacccaagccgccgagaaggattccaagaatacccgcagcgattttggatttttgcatgccggccggtacgggaaccggaaacgccacgccgcactgggtgcagatggttgcgccggggttcgagggcgcgccgcagtttccgcaaaaacggttgccggtcccagccgctacgccgcaatggacgcagacagccgccatggggtcgatttggttgccgcaatttctacaattcattattatttcctcctgataacaattctttagtttataatttcagacgcgggcgccataggcaagcaccgcgcgtcctaatcttttagcgggatacctgcgccgtccgtcgaaattccgccgcagagaatcataataccttcaacgaggccccaaatcgaggcagccagcgccgcgaagataccgatgataaaaatcgcagtgaaaaaacccgcgattgtcaaaatcagctgtgcaaccgctttgcctgtatagccaagataaaaattatggacgccgaaagagccgagaaaaatccccagcagcccggcggcaatttttgatttttgcataccggccggaattggaacgggaagcgccgcgccgcagccgatacaataaacagcgccgggagcggtctgcgccccgcaattcgggcaaaaacggtttccgttgcccgccgccacgccgcaatggatacagacggccgccatggggtcgatttgatttccgcaatttctgcaatacatgctgactcctccatcaaggtcgaaatttgtagctttctgttttccatcataaaggatttctttttttctgtcaatagaaagtataaagcagcggtaaacgttttatgaagattttgaaaattcatccgtacatcttttcgtaatagtccttatattcgccgttgatgatggtttcccaccatccgcggtgcgaaaggtaccagtctattgtcttgataataccttgctcgaattttgtttccggcagccagccgagctcttcatggattttacgcgggtcgattgcgtagcgcatatcgtgccccgccctgtcttttacaaacgtaataaggctttcctcttttttaagataccggacgataagccgtacgacatcgatattgcgcatttcgttgtgaccgccgatgttgtatacctcgccttcgcggccatttcggataatcaaatcgattgccgcgcagtggtcctccacataaagccagtcgcgcacgttttcgcccttcccgtaaaccggcagcggcttgtcgtgcagcgcgtttataatcatcagcggaatcatcttttcaggaaaatggtacgggccgtagttgttggagcagcgggaaatcgtaacaggaagcttgtaggtcctgctgtatgcaagcgcaagcaaatcagctgacgctttgctcgcggaatacgggctggaggtgtggagcggcgtttcctccgtgaaaaagaggtcggggcggtcaagcggcaggtcgccgtatacctcgtccgtggatacctgatgataccgcttcacgccgtattcgcgcgaagcgtccatcagcacctgcgttccaataatattggtgttcaaaaacacgccggggtccagtatagagcggtccacgtggctttcagccgcaaagtttacaacaatatcgaagcgttcctgctcaaataaaccgaacacgagcttcctatcagtgatatcgcccctgacaaagcgaaaattcttatttttttccgcctgctccagtgtcataagattccccgcgtaagtcagcttgtcaaggcagacgagctggtcctgcggatgctttcccaatatgtaatagatgaaattaccgccgataaaaccggcgccgcccgtcactaatattttcattttactttcctttcatgataagctgtatttatttaaataccatttgcaagggaaagcagatactttccataatcggtcattttcagctcttccccgatttgcctgagctggtttaccgtaataaacccccgccgccaggcaatttcttccaggcaggagatataaaagccctgcctggactgcaccgcttccacatattccgatgccttgagcataccttccggcgtacctgtgtcgagccaggccattcccctgcccatcagggatacccgcagctctcccctttctagatacacgttatttacagcggttatctccagctccccgcgatttgacggttcaatatttttcgcaattgaaacgaccttattgtcataaaaatacaaacccggaaccgcaaagttcgattttggctttgcgggcttttcctcaatggacaaaacctttttatctttgtcgaactcgaccacgccaaaggcggacggctcctttaccgggtagccgaaaatcgtcgcgcctgacgttctttgttttgccgtgttgaggatgcgtgtaaaatcctgaccataaaagatgttatctccgagaatcaggcatacgttttcatccccgatgaattcctccccaaggatgaacgcgtcggcaagtcccctgggcttttcctgtacctgataggaaaattccacgccaaagcgggagccgtcgcccaagaggcgctgataaataggaaggtctgacggtgttgaaataatcaggatttccttgatttccgcaagaagaagcacggacagcggatagtaaatcataggcttatcgtagattggaagcagctgcttcgagaccacctgggtcatcgggtagagcctggttccctttccgccagccaaaacaatacctttcattttttcacctcacataatgggtacgggtatccgcccgaaaatattcaggctatctgcttctcttctggagctccagcgtttaaaaaagattaaattccaaagtcgagcgaaaaaatcacaatgcccgccataatggtcaggattccgatgaatttcttccttgtaattttttctttcaggaaaatccggctgagaagcagcagaaaaatataggtagacgcagcaattacatgcgcctgcttgagcgggataaaacgcatcagataaatattggcaaccaaaacaagggccaatatgccataggagccgattacccatgggttcaggtattcaaaaatttttcccttatacttctttttcgcgctgatattgagcatcaattgggaaacagcggataataaagccgtagcgacaacaccgatataatatttagtcatctccgtgcgccaccaaaaccactcccgtaatgatgagcgccgtcccgatgacgttgcccagagtgatcccttccccaaaaataagcacggaaaacagcaggacccagatagtcgtcacacttttattggaataagcaacgctgggactgaagcccttaatcgcctgctgccataaaatcgcgtatacgccaagcaccgctaccataaggaacagaagcagaagatattgtcctgataagaattcaaacccggacgcatacttagacagcagggatgtaaccgaatataacaaaatacagccatgaagaaacaggtatttctttgcgggctccatagaaatcctactcatttcaaatgcggctcctcttcctcaagcattctgattacgcgcgcggggtttcccgctacgacgcagtttttttctacatcctttgtgacgactgaaccggcgccgattaccgcgttttccccaatatatgaaacgccgggcagtataatcgcctttgaaccaatccaggcgccgctgccgattttaagcgttttcaatattgtttccttgctgccggggctcgtccagccgatttccacagggtgctcatgcgtatggatttccgcacctgccgatataatgacattatccccgatttccaggtttccggtgcagtcgatatatgcgttcctggcaagcgtcaggtggtcgcccgccttaaaccggctggctttttgacggtgcgtacgcgataaccgcacatgatattcgataatgggtctcttcccaatccgaaaagcgctccggtatattagcccccgcagcttttgaagaacaggaaaatcaaacagctcaattccaaaaatgatttgtatcagccggcggtagctttctatcaatatataactcattttttctcctctaactcacgtttcatatcacatagtgcatccgctaaatgaaatacagcatgaaagccaagctgccgccgtgcttttgtcacatccattagaaaagaaaggccgtcttcagctttatcaggcagcatttggatgccctcgggattttcaaatacagagcaatatgcctgtgcaagctccaggttagaggtggattccccgctgccgatgttgaaggcgccggagcactcgctgtgccggcatgcctttaaaaccgccgccgtcacatcttttatgtaaatatattcttttctgctcgcaccttttccataaacagaaagaggctctttagcaagggatttgctaagataaacggctgggaggtcttctctgcgcatgccgagccccaaaacctgcgctaaacgcagcgatttgattttcattccataattacggttgaaaatctccgcaatgctctctgtgcaaagcttagctgtcccgtaacggttgagcggagccgtaagctcttctttaaacggctttggcaggcttggatgatatacgcagcggcttgaaatattgactatattttctataccaaggcactgcgcggcgtaaaaaatgttttcacaagcggtaatgctgccataaaagctttccattttcttttccgcgccgggactgcttttcacagcgcccaagtggacaatacaatcgcagcccgcaaaaatcgagcgataagaatcgacggaataatcggaaaagacataccgaatattggaatgccggtaaaagcccctatcgtccgcatgggaggttgccgctataaaggtatggctgcccgcataatcttttaaaagatgctgtccgataaagccggtcgcgccggtcaatccgattttcatgccgtttcatccttataaatttgataaccgcatttttccatatagccgttgagcttttttacttgctcgcccgtctgataataccagtcgatatattcaaaatcatgcatgtcatatttttcacggcaaaaagcctgtccgggcttttcacacataaactcaagcacatatacgccctccttcggttttggcgcaaagacgtgcgtactgttttccataagcgattcaagcgacgccgctaaaaggtccacgccgcagtaatgcttaatcaggttccacatatggcatccgtcgagccggggcgtgacctcgattatataaggcgtatccccttgcagctttatctggaaatatacggggccgtttataattgacagcttcgcaatggtattgagcgaaagcgtgcggatgttctcccgcgcctgcgctgaaaggctgcgcgctcccataatgtggcgtttgataattcccccgggcagttcgtcgaaaacctctctgtcggagataagcagaaaaacgacctcgccgttttgcacatacgcgttgacggaaacctccggcccatcgatatatttttcgagaatgacattaccggattttgaataggatttggatatttcaaagtattcctttatttcgttttcgttttcaattttatagcagccgcgctgtccctgggagtccgtcggcttcatcatgcaggggtactggccaaatccaagcgcctgctctattccgcttgcgcatagatacggcaggttcccctggaaatccgcgcctaaaaatgagcgcagcctgtttttcgtctggcagatggccgctgtttcatacgagatgaaatgcctcaggttcagctgttcgcttaccctcatagcggtgggaacggcaaggtcggagcctaccgaatagacgacgtctattttattttccgaggcgtattcacatacggcgccgatgtctttgatgtctatctgtttaaaatggccgagcagcgggataccgcggtcggtactggtatagctgcagccatatacctcatagcctttattcctgcaaaagcgaatcgcgtcaacctgagcgttgcccgctcccagtatcaatattttattcatcttccgtttcctccggagccttaagaatttccctgacgacatactgcggctgtttattgagccccaggaacatcctgccgatatattcgccggccaagcccaaaaacaaaaggttcagccccgcgaaaaagcagacggccgccatcagtgaaggccagccgattgccatatgcgggttgcagattttttgaatcataacggtaattgcaccaatgaggccaagcgctgcgaaaacgtagcccatgacagtcgatacgcgaagcgggacaatagagaagcccaaaatacaggaccaaagcttcattaaggatttaaaggtgtagttggagcttccagcctcgcgttcaaagtgcttaatcggtatgctgccgatgtttcccgttgtgcgcagcaccagcccctgcatataagaatgcgagcttttataagtgatgatgctgtcctttacaaaggcgcgcataatacagtagctggaggttttcaggtcctttggcttgccgatgagcacgcgcacggaccaaaagttgagcttgctgcttatattgcgaaaaaagccgtgttttttttccggataatagccataaactacatcgtagcccttttcgatttcttcgaatagcaaatgcagctgggacgggtgcgtctgcatgtcgtcatccattgtgacgatatagtcgcctcctgcaaaattcagccccgccatcgttgcgttatgctgccccgtattttttgcaaggccgattgaggttacaaacgggtattcctttgcaaggcgcttcagctcggccatcgtctgcccgccgtcaggtgaacagtcgtcgaccaggatgaattcaaaatcatcttttttaagccggcggagctcctcagaggtagtttccactaccctgcggatggttttggaggaattataacaaggtatgacaatggaataacgcatattttcaccctttttcaacatcctggcgcccaaaaaaacgctttatcgattcggttatataagcaatatcggactgcgcaaggccgtaatacataggcagacgcagcaggcgctcgctttcgcgcgtggtgaagcggtcttcaccaacaaaacgcccatattgccttcccgccttagaggtatgcagggggacatagtgaaacgcggtggcaatgcccttctctttcaaatacgcggaaagccgcgtgcgctgttcaaggtctttcaccttgatatagaacatatgggcgttgtgcgtgcattcgtttggtataaccggaagctccaccgccccggcttctttcaagggcgccagcccttcataatacagcctccagcttttcagccggtcttcatttattttctccgcctgctcaagctgcgcgaaaagatgcgccgcgttgagctcggaaggaaggaacgaagagccgatatcgacccatgtgtacttatcgacctgcccgcggaggaagcggctcctgtcggttcccttttcccaaacgatttccgcgcgctcaggcgaagcgccgtcgtttacaaggaccgcgccgccttcccccatgctgtagtttttcgtttcgtggaagctaaagcagcccaaggcgcctatgctcccgagcgggcgccccttataaaacgacatgacgccctgcgcggcgtcctctattaccttaaggccataacgggcggcaatttgatttatcgtatccatttcgcaggcaacgcctgcataatgcaccggcacgattgcctttgtttttttcgttaccgcctgttcgacaagctgttcgtcaaggttcatcgtgtcggggcgaatgtctgtaaatacaatatttgcaccgcgcaaaacaaacgcgttcgctgtagaaacgaacgtgtaagagggcataataacctcgtccccaggctggattccggcaagaatcgccgccatttccaatgcgccggtcccggaggtcgtcaaaagtactttttccgcgccggtcatttgctcgagcatattctggcattttacagtaaactgcccgccgccgcaaatttttccgctttggattgcgccggcaatatatccctcttccttgcctacataaggcgggacattgaatcgaatcatttcttccatccctataacttgaaaattctttaaatacattttattttaccataaccgtgcttttattacaatagcttttgtttttttcgcatgaaaaagccgcatccgtcctacagatgcagcttttttacaatttcttcccgaattgtttttcctttaaacagaaaaagcgcggcaatcgacataatactgagagaaacacatactacggacgggtatacgatgttcaaaatcccggtaaacaggaacacggcgggtacggcgccgtagaggcagtcaatcaggatatacacgatatattcttccgccctgattctccttgtaaagaccatgaccgccaaaaaaatcgttaccgcggcacaggtacagggaattacataatcgagcgaccagccgtggctgcctgtgaaatggtcccaaagcacaagcaggattgataggataaaaagctggtacgttatattcttgataaaattatgccgtttcgcaatactgaccacgcctgtaatccaggcgcaaaaaatgccggctcccgcataaagcgaccaccatacctttgttggcgccataaggttgacggcaatgcagataataatcgcggcaattgaaataaagctgagcaggcggaataaaaatccggaagagactttttctttcggtacatccggaaacacgtcagagccggcttcccccattcctttgagctctccctggcacagcgggcagcattccttattccctgctacctcaatcttgcatttttcacagtacagcataaggattctcccgttccaaattaaaatcgttgctgcgtatttccgccgcaatgcctttttccgtcaggctcctgataaaattacgctggatatcggtcgcgatgaaggcggaggtgaagctcaccgtgagggtatccccgaaactgcaaatgcaaagctgcagcttcggcgtcgaggacaaaacgtcgaacagcctgatgtaaggcgccatctgaggcggcatttctattttacctacattggatattacggctgtaacacccatatctgtaaaacgccgcgcagcgcgcagtccaaaatttttaataggcagcggagcaattttgacaaacgggttgtgctcgagcgcagcgaggcggttcatccggatgctcagcttttcttttgtcagctctttctggaacgtttcagatacgacacggataatgtcctgaaattcgccgctgcgctcgcggaaggaatactccacggttatcatgccaaaaaaatttttcgctgtctccgatttaaaataggggcgcaggtttaccgggatttgcagcacgaccgggtatttttctttccttataatcatttccctgtggatagattcaatcagcagcgccgtcagaaagacggtcagcgtcgtatcaaacgaatgggcggcgcccagcacttctttcaccggcataatcgcttcgattacctgaaggcggttgtcgtcccgctgcgcgcctttcagcctgtatgcgcgcatagccccggcttttacccgttccctgctctttttataatacttttcaaagctgtccgaggctttctgcgcaagggaagcatcatagtcgagcatcggcttgtttcccgcaaactcccgcggatgcgcgagcagcaggtaatggtaaacaatcgtctttaaaaactgcatggcgcccgttccgtcgcccagcgcgtggtacatttctaaattgatgcgcgttttgtaatatgtcacctggaaaagcagtcgcttctggccgcttttataaatggtggagcagggcggcgcatcctctttttttactgaaggctcgagttccttgtggtcgagatagtaccaaaacaggcccgtgcgcatgacgcagagaaaatgcggaaactccgcggcagccgtgcggacggctttcgcgagttctttctcccgcacctcctcacgcagctcacaggaaaagcggaatacgtttgtattggttttataggccgttgacggaaaaatttttgcagcattgtccaagcggctccattttgctgcatgccctgctgtcattcagcttcctccccatcaagaaaatcgttgattaatccataggctttttgcacctgcgcataatgcgggtcgagcgaaaaaaagccgtgcagcgcgtcctccatgcggtaaagggttacgtctgagcctgcttcttttaaccgctgcgcgtaagcctccccctcatcccgtaaagggtcgtactgcgcggtaattacaagcgttttcggctgtctgctgaaatctttggaaagaaggggagcaaaatacggattctgcaaatcctccccgctggacatgtagagctccatataatcgcagatacgcttggaggtcagcagataatccttcccgttttcccgtacggactcaaacggggagctgtctgtatagtcgttatataaagccggataaatcaggatttgcctggcaaccgtaaacgcgccctcatcgcgcgcacgcagcgatacggccgccgcaaggttgccgccggcgctgtccccaaccagaacgatgtcttccggccgcgcgcggaagctttcggcgttgcagaaaagctccttcgcaacggcatagcaatcgtcaaggccgcagggaaacggattttcaggcgcaaggcggtactccacagagacggtcttacagccggtctggtccgcaaggttcatacaaacggtattgtaggtatcgatgctctccgttacccagccgccgccatgaaaaaacagcagaatatcgtttcttgttttttcacgcggcgtatagatacgcaccgttatctccctgccgccgcttaccaccttatggtcccagtttttataaagcaggggtttgagtaaaaagggggtcttaacaatctcaaacgaccgctggagcttatatagtttcttgatgtcggcctccggataagacagcgccttaagcgcgagcctcatcgccttattgatcgccataggtaagcctccttttactttattgtcccaatgaacgctgttcttttaattctaaggtttttttacgcagaaggcaagcaatttctttttgaaaaaaggaacagaccgccgtttttccatttaattttctttgccgccggaaggttccggcagcgcttttgcgggcttcgcgcgctcgagcatctgcgtcatttttgcttttccgccgcccgtaaattcttttgccgccattgagaccaaagaaccaatcgtccgcgtcagcaccttcctgacctccgggtcgatgcccttgagcgcgttaagtattgcggtagccgtcgccctaaagcctccgttgtcgtccataaagtccttaatctgtgtcgatttcaaaatactgaacagcgcgtcagtaaacgcttcccgctggctgtcagacatggaattaatccaattattgagtgtgtcgtccattaaaagcgcaccggcgcttatggaatcgagccggacaaaatcgcccccttcaacaagccaggaaagcgggtcgtgctgcagaatgccaaaggtatcgctgtcaacgacggtatactcgcaccagtggtcgagcagcattccaacgacagaggatttcggaacgaacttctttagccggggctctatatccaaaaaaccgctcgaacggaaaaagtcctcctgaaaaccggggccgtcgttgtcgtaaaccgttttcagccgcttttgcaccgccccgtcgcacaatgaggacgcatatacagcaagatttccgcccttggaatggccgcccacgcaaatatctccccgcagccgccaagcggccgtattgaggtaatctacgctctgcgtttgcgcgggtacggggctcatgaaggccatgttaaaatcttccttccagcctgcaagcgtcccgtccgtcccgcggtaagcgacaaagctgctgccgtcatctagcccgaatgtaatcgcggaaaactgcgtttcgctttcctcgtctagcctgctgacataaaagttgagcttcatccggccaaaccgcctgctgattaaaagaagcggcatcagctgtgtggccgctttgatattataaatctttttcaggcggtccggctcaatccttccgtttaccgcgtcataaaagcaaacagcttctctgttttcttccagggatggcaccaggccttcaaattctacataagaaagcaggcttaaaactaaattatcgacgttattaaacgctttttcagaaaagctctgcccgcctatgttcagcacataatcgattaatgttcccatacggcacctctcatcataaaaattcttcaatttgtaaaatatacgcggcgcaaactatgtacataacacagaaaacccgcaagttagtaaatagccgctatcaattattggagataattttctgattttatattactgcattcacgattgtaagtcaaaagaagttgctatattctatctcttttgtaaaaaatataaatataaataggcaggcgaatgcgccttgctgtttttctgtaaaaaattttcttttcattgggcggctgcgcactgcgcggctgcttctttttaagtaaatgagaatataattcacaaaatttcattccatttcacgaatacttcttgctgtattatttttcaactatttgatgaatttatgccattctttggggacgtaagaaccgttgcaaaatcggcggcccaatggtactatagccttatgaaacgaaaaaaatgaaaggttggtccgttctatgaatatgccgattgtttatttatataatctcgaaaccgaaaagggcggtaaaatcaaaaccttatgcctgctgctcaaaatccgggtacgcccggttaataaaggggagtatggcttgaagcttgctgtattgacaggaaaagaggagcccgccgccctgcctgatgaggttcaagattttgatgatgaaatgattttaatgtccaactttacaaacgccatggtcaattcttttttacaggaattccgcaaaagaggaataaagcctgtcgcgctgaaagcaatccttaccgaaagcaacgcgcaatggaattccgcacagcttcatacggagcttctccgggagcacgaggcgatgttcggaggcaaaacggcgcacgcgccggaataagcatgaagattattatatcgcccgcgaagaaaatgcgtgcgggcaatgattttcttgaaccgcgcgcgatgccccagcttctagccaaaaccaaatgccttcagtcatatttgcgaagcctttcctatgacgagcttaaaaaactgctgtgctgcagcgaccggattgcaaaagagagcttccggcagttccaggaaatggacttataccgcagtcccgcgcccgcattgctttcatacgacggaatacaataccaatacatggcgccgcagctttttactttggagcaatttgaatatgcgcacgacagcctgcgtatattgtccggtttttacggattgctgaaaccctttgacggcgttggctggaaatgcaggccaagtgccgggccggcggatgtaaaagcctgtatgatttttggaacgatgatttgttccgggcgcttataaaagaggacgataccatattgaatcttgcttccgctgaatacagcagggctgttgcgccatatgccggtaacggctgccgttttattacggcctccttttgtgagctggtggaagggaaatcatcagaaaaaggtgtttatgtgaaaatagcgcgcggtgaaatggtccgctggctcgcggaaaaccatgtaaccgacccgcgggacataaaatggtttaaccggcttggataccagtattcaggcgtatcatccagtgagaaccactatgtttttgttagggaaaaaaccgtataaaaacaggagcggctgttgtccatacaacagccgcatttgttttatctctttttcattctaaaccacccgttttaatcaacgaacggtttttcttttcttgcgatgcgcgcagacaatggcgccgcccgaaagcacggcaagcagagcccaaagcatcggtgcggaaaggtcgcccgtctggggtgcttttccttcgccgttctgcccgttattcgtgtccgcgtcgccaggaattgccggatccggcttttcttccggctgcgtcggcgttaccggctgaaggttcttttgcgcaagcacataatagctgttgataaagcttgtgttcagggcaagcgattcgttctcttcttcagtaacaggtactaaaaccgctttgccgccggtaaactcaacacggtaaagctgcgtggctgacttatcgtagcctcccggcaggtcgaacagaaggtcgacgccttcgccgttttcgagtacaaatttttctccgtcataaacggtttctatagacagaagcgtaaacgcctcgtcgcgtccttcctgtttgagcgcatccctgaccgcgttaaaatccgccccctgcgttgcctgggcaacggtaaattcaacgccctgcggcagtgcgccctcgctgtccaccatcgtaacgccgccgctgctcagcacggtatcgtcgagcgctttgacggtgaagcgataggaactgccttgatagccctcggtgtccgccagggttgtaacggttacctgcgcgcctgttttcagcacgcttcgcggaatatcttcatttacagcgaaggtacggccgctaaccgtgagttccgcattgccctgcgggtcgttaagaacaggaaccattacgacatggtcggtataggatggcagcgtaatttcagctgccgcggacggtgtgatttcctgtgtctcgccgagcaggctgcctgttttatcgtagctcgatacctgaagctttataagctgcggcaccgttacgtcggcattctttgtaaacgccttaatcataatgttgccggtattcatgatagttttatccgcaaatacagaagaaacttccttaaaatcttcccagccgtcctcttcgctccagacaaagctttcgcctttatttgactttaccgtgtactgcacaagtccttcctcggcgctgccgtcggcagcgtagccagcctgcgcgtcctttggcgcagcctcataagaaacataataatttccctgctcatcaatgattgtttccactacggaaaaacgctcgtctttgcttagcttgaccggctgtgaaagcgcgactgtatggaaaccgctgtatgcaaagctgtccctgccggccgcgacaagctcgccgtcatcagctgcggcggcgccttcattgagcctatataccttgacttccaccgtcgagtttgcagcatttgtcgttgctgaaaccgctccaagctcttcgtatccagtagcggtaaaaacattagacgccgagaccttttgagccgatttcgcatttaatgaaaagctcgcgcccatataatcgtactggtagttgttgtcgtaatcgaagccgctgtcctctgaatccaactcaaggctggttggcatcataatggtctggtcgtaataagacaggtagaagtaaccgctgccgtcgatcccccatactttatcgggccttgtttccttggtgccccagctgtttttgacaatccaggcgccgggctgctccggtcggtgagcctcattaaagttttctacggcatagctgtcgtcccagccgacgatggaaacgccgtgattcggcattgtgctgccggcaccgaacataataaactcatccacgcactgcgcccagttatcataattgaagtatgcgctgttgcccgttgcctcgtccggcttggaaacgtcggcgtggtaggcgattgtaacgacgccggttttcatcagcgcctctttgattgcaaccgtgccgctttcgttatattcatacggcggcaaatttcctgattcgtcaagctcaaaatccccgccataggaggaagggctcggcagatagtccgcgttggtcaggtgcgcaactgaatggaaccgtttgctttcgggtaaagaccaatcgccgtttttatcgtccgtaccttcgttgttttgatagggcgcgtccgcttcgctggcggcgccctgccagctgctcaaaatagaaacagccttattgggattgccgccctggtctagctcattgttgtaatccttaagcagtttgattccttcgcccgcctggctgcccgtttggattggctggtacaaataccatgccaaatggcgctcggaaaggtcgggatttgaagttccgttcctcatcaaattgctctcagacgcggccagcgcgccgaatgcccagcaggcgccccacggcatctggttcttaacagaggtgacatacccctcatcacgcaggtccagtttctcaggcaacgcctcgttggcagcgggcaggtcctccccatcatattgataaagggacaaatcgcggctgctgaagcgcaaatctcccgctatgtagtctgtggcaagggtacgcccctccttttcggccggcgcgccctgcaccgcgggtaccgccattgccgttagcagcagcagcgccgttgcggaagcggatatgcgtttccaaatagattgtttcatttaatagccttctttcttaatgtcagtaaaacactttataaataataccataaatttacagactaagaaagtgaaacttatataaaattgattttcgccataaaaagggtgggcgcaggcttaagctgcttcgtcctattaaagttgtgttccatgattagtcgttgggtcgctgatagaagttccctgcgacctggtctgtttttaggatgttgataaaagccttcgggtcgacctcgcgcactttttttgtaagctttttcacctggtcgcccgagataacggaataaatcatcgtccgtgattccccgttataaagccctgtcccgtaaaaaagcgttgcgccgtgatgtgtgaattccttgatatgctcgtagatttcttccgattggtcggaaataatgaacagcgtcgtgcgtttataacggaagttgagcatctttaccacctgtgtggaggtaaactgaaagatgatggaataaagcgccttatcccagccaaacagaagccccgcgaccgcaagcatgacggcgttacctaccaggatatagttccatgcgtccacattgagcttgtcggacagcgcgaccgcgatgaaatcagtgcctccgctcgtagcgcggcccatcaggcaaaggctgatggcaaagccgttaatcagcccgccgaaaatgcagacaagcaaaacgtcgtttgtcagcggcattgcgggaatgacgtcagtgagcgtactcgtcaggacaatcatcaggcaggaatataatgtaaaccgctttcctatcagcttaaagctgataagcgcgggtacggcattgagcagaaaattgataagcgaaaacggaagggataaatgcaaaaactgctgtgcgctgcgctggataagtagcgtcagcccattgaagccgcccgggaacagcccgccggcttctacaaagcttttaatattgacagccataataacagaagccgcggcaatcagtaaaagccttctggcgtgctcgcgcgccggcagcgaatgtacctcgtcctccagaatacgcctggctttcccctttttcatgccataccctccagaaaaacagattgcgcccaaggcttacacagcccaaagcctgatattgcggttttattgtagcatacccggatgcaggtttcaaattccaaagcagaccagatggcccgtatcgcatgataacaggatatgataaaatcaaccgtctgccatcattttttcaaatacttttccgatatccgcattcaggcaaagagaacgatccgcaatttcttccggacagtaagcctcgccaaaattcaggcaggcataaaacgctttttcattttgcgcggtcatccgccaaaatgggtacttaataacggccggcgtattcccaccgacgccaagctctaaaaacaggatgcgctgcccttcgtgcctaaggagaaattcttcataacgggcgtctgcctcgtgccagcccctgtcctccacaaaggaataatcgcagcgcaggttcattgccatacgcgcgccgcacacagggcagtacgggacaagctctgatggcacgcgcatccccttctgccttgctatcatttggcggacggctgtttcattatcatacgtcttgttatggcacggcctgccgcactgccaaagcccgtaatcgccttgtgtatagaacaggcgccgtttgtcgaaccccgcaagctggaactgatggtcaacatttgtggtaacaacaaaataatccttatcacgaagctggaaaagcaggtcgagataagcctttcccacgggtacattgtaacggttccagtaaatatggcggctccaatacgcccaatattcccccggggtactgtagggataaaatccagcggaatacatatccttaaaatgatatttttctataaagtccgcaaagtgccgttcaaaccgttccccggcgtaggttaatcccgccgacacagacaagccagccccggctccgacaacaacggcgctggccctatcgatttcagccttcaggcgcgagcaggctttggtagacggcatagtcggcgtctttgaacacattgaatatcacctcgatttccgtttgtgaacggctcagatagccggtaaccgtattaaccgcgatttccgctgccagcgtgttcggaaaatggaactcgccggttgagatacagcaaaacgcaacagagccgatgtggttttgttccgcaagctccaggcaggaacggtagcaagacgcaagcagccggcagtccctgtcatccggtttgccggaaataacagggcctaccgtatgcaggacatattcgcagggaaggttgaaggcttgcgttaaaaccgcctgtcctgtgggcaaaccattttttcgcttccgcatcagctctgcgcagcatagcctcagttgtattcccgcataggtgtggacggcgttgtcgatgcactggtggcacggaacaaagcagccgagcatcgcgctgtttgcggcgttgactatagcgccagccgcgagtgttgtaatatccccctgccagagataaacgcgctccctgacaggggtaaggtccttcatgcttgttaccttcttttttgaaagctcttccctgaggtaatcatcctgcacacaaagcaggcgttcccctgccggaattggcgggcgcaggttcatcaatgacctgagtaaacgctttttcccttgtgttgcttcaggaatttcaatatcccgaaaacgcggctgttccttgataagttcccgtatcaggtaatccaaacgctcccgctgcgtcatactgcattccccgctttcatccggttaaaaatagtaagcggcggggccgcttcacagctccgcccagcatatgagaattatccatagaaaaagccggccgtcatatcgaggtaattttccccgccgtaattggggtattccctcatcacggccgttttgaattcccctgcgctgccgcaggccgcggctatttcctccagccttttgagatacgcaagctttgtttctacatcctttaaatcctccggcgtataatgggaggtcaaaaccagcatatagcctttttccagataaccctcgagctgtttttccatagcttcggcgtgctgtgcgcctgctattatagaatggcagtcatgtcccagcatatgggtgtagaccgtatttatttctgggatttcgaggtcgaatgcgtcgggggtaaccgttataatcaattcaatcccgccgattgtggcgggcccttctgccaaataatcggtgactgtatgaaccgtgccgtcaaaagcctctccaaacgtttccgtaaagctttcaatcagtgctttcccaccgcctgtgtgtccgtattcatccgcgtttttggtagcatatttgcgcacatccggcaagaacgacgcgcccgccatatgataggccagcagcacacccgaaacgttaagcccttgctgcgcaagatacgcctccagctccctgttgttgtcgaaaaaacacggggattcaatcaggatagcgttcccgtttttctcaataatgaatacctcgtcgtcgatgaaatcgttcgtcttataagcgtggagcttgacggcgccaaagtcgtagacattcatttctccctttgtgagtgtaattctttcatatgtatctttgttcattgcagtttcctcccggaattatattcaggggtcattgactttatcatcccctgaatatacaatagaaccatagagacaatttgtaaagtaagcacttttttgtttggtagttaccttttggatacaattggacagtttctgataagaaaccattgcaaatacatgcgctttctttaagaatacgtctgtcatttataatttttaagagatttgggggacttttatggaacggcctgtattgcccgcctgccctgtggagatgacgctttccatgattggcgataaatggaaggtattaatcctgcgtgacctgctgccaggcacgaaacggttcggcgaactgaaaaaatcgataggaagcgtcagccagaaggttttgaccgcccagctgcgggatatggaggaaaaggggcttgttttcaggaaggtatacgccgaggtaccgcctcgggtggaatatacgctgaccgacaccggatacagcctgaagccgattctggacgccatggcaaggtggggcgaggagtataaagaaaaaaacgcctgaagaaagaaaataaccggggacggctataaagccgtccccggtttgactttgtaaatatgattcgccctgctgaattattccgtaaccaatgcgtaagctgaaattttgcggatgcgccaggtggtaagcatggaaagaaggtaggaaaaaacaacgacgccaacgccgaagcaggctatccagagcgggtctacgataaaactggcccgcattacgcccgcgcccttcatagcgaccgacatcagcgggttcgtgcaaaacgcgcctaaaaggctgccggttgccgagccaaaaacaacgggaagcataaaggtaagggaaagctggttcatcagctggaaggtagtgtagccgatggccttctggataccgagctcccgtttacggcgaatgacggaggagcttatcataaagtaaagcaccagcgcgacgaccatcagcgtaataaccagcatggccagccccattgcggcgacaatgctctgataggaggacatgccctccgccatgagcttatcgaagtcggaaaagctgagtaccgtttctttatcgaatttatcctccagcttttcgataaacgcggcggtttcagttccttcattgagataaatataaagggactgcggcttaaaatcagggttgagccgcttaaaatcatcggcaaggatacaggtattcgtcccgcccatgctggaaccgttcgtaaggcctgttatggtaaagatttccgtcttatctccaaagcctgcttcgacggtatcccccacggttttttccaggcgttcagacaaaatacccgccaggacgatttcattctttttttccggatagcggccttcatagaccagccgtgtttctttttcgccgtaatcccgcatgacataagcagacacatcggaaccatccagtttgattttcacctcatccagatagacagtcttgcgtacctgctccattgcttcaatcgcttttatcgtttcggactggtccttttccgtgttgagcgcggcgattatgtttgtaatttccatgcccggcacctcagcaaaggcttttgtatcgacggttgtgttgtaatacatgacgacaccgaacgcccccgcaaatgaaacggccgccagaattactaaaatcatgatattttgcctgatgttctgcagaactgacttgattcccaatgtgagcggcagaggccccgccgcatggtccagcggcaggcggttatgcttgaacttgcgcgccgagctttccccgcgcagggcgctgatgggattgagcttttttatgcgccgggtggcaagcagtacaacaataagaataatcaacaggataataagcagcgccgcgatgctgattgcagggtcgaagccctgctcccaccgaaggccggattgctgttcaaacaccgccgcaaccgctggcagcagcggataagaaagcgaaattcccgcgatacatccaacacccgcaatcaggagatattgcaggagaagggaaagcctaatctgcctgccggtatacccaattgccttgagggaaccaattttcatcatatcgtcctctatgctgttgacaatccggaagcgcaccacaagcaggcagacggcaacaataatcagggaaaacatgaccatcatagctgccatcatcgtcgccatcatacagcgcgccatttctatgagctcaatatcgaatgccaccaacatagaggacatgtcaccggcaatcagcgaagcagaattaaggttcataaattcacggacgccgctctcaacggctgaggaattctttacctcatccagctttgcaaacacgagatgaaggtcgtatgcggggttatccagaatgccggaaacctcacggtaggtctcttccggcaggtaaaagcttatcaggccggtatctgccgcgctgaaaaaaatatcctcagtatagcctttcactgtaaaggtgagcgacttgtctttgcctgaagattcgtcggtataatcaagcgttattttgtcattgagctgatagccgtaaactgccttaaaaatatccgggacatagacggacatttcccctgaaggcaggtgctctccgacatatttccatttggaaatctcccgtttttcgtccatgttctggaacaaaatggtatgtgatttttcttccccgccggttacgacgcgcgagctgagccaaagcgcattgtttgcctgcgtcttttttacatgctgattgctgtcaatatagcttttgacttcatctgagtagattgctccgggaatcgcgtagtaagcgtcggcaggtgaaagctcctgtttcaggctgctgaaaaagctgccgtaattgattgcaaccaaaaggcccatattgagcagaagcgccgcgattaaaaacatgacgacaagcgttaccgaaacagacttggatttccggatattcgcacgggcgtgcatccataattttcccatcggtcaccaccccatttcgcttaggaacgaaagaagcttatcgtggcgctgcctgtcgccgcttacgtatttgcccagcctgcactccccgccgattacgccgtccttgatatacaggatacggttgccgcgccgggcggaggtcaggtcgtgcgttaccatgacgacattctgcccggcgttgttgacctctgtcagaacgtcgagcaccgctttaccggatgcggaattcagcgcaccggtaggttcgtcggcaaacacgaccttcgggcggttgataagcgcgcgcacaatcgcggcgcgctggttttcaccgccggaaagctgggatgggaactttctccagatggtttcgctcaggccgaccttcattagaagctcctttgcgtaggtaacaatcgcttttctgtctccgctggtaagcaggcctcccgcgagaatattatcgagaatactcatattatcgagcaggaacatctgctggaacacaaaaccgcagtgcttcctgcggaaaaccgccagtttatcattgttcatgctttcaatatccgtatcaaaaaagcggatattgccgctcgatggccggtccataccagacaaggcgtagagcagggtcgacttgccagcgccggacgcgcccatgattaccgtaaaatccttgtcataaatttcaatatccagattctttattacctgctgctcctgtgaaccgatacgaaagcttttacacagtttatcggtttgaatgattgtttttgtcatattccaatacccttccataagttattgtgcgtttttgctcaaatttttgaagccatacgccccgcaaaggccattaaattctgtttgcagtcgctcgattatttgttcttcgttcatatccatatagccggtattgagcataacggccaagccataggagtagattgccatatcgtaatgaaagcgcagggcggtatctttagggattccatagccatcagacagcaccctgatgatatcgggcgcgttgacgtcatcaatcgtctgccctccgccgccatggcggtcgcacatgtaaagatagcggaaaagctgcttttcttccttagcaaaatgtaaaaagccgagtccataagctatgtagggcgaaaatttgctgttatccttaaatatctttaccttttcaacgtagcttgcctccgcttcttttttaagctccgccttcaattcattcatgttcccaaactcagaataaatcggctgtgtggagcagccaagctccttcgcaatttttctggcgttaactccatcatagccttctttgcgtaaaatgctgacagccgtcccgataattgcagaacgtgtaattctcttttgtgaaggcattattaatctccctccctttttatataacatttgttattataacaattgttatgttattctgttttctgcctgttgtcaaggctttctcggaattaaagggctttatagcccctttgcttttcctagaaaaattatggttttaagtaataggcaacaccaacgccccagatgcattgtatccccagttttttaatgcccggcaagccggaaacgataaaaaagccgtcagccaaatttaatttggctgacggcttgagccgcatttcatctttctgtctttcagcgtgcacgtaacaaagcgccttatttacttagaagccgcttgatcgcctgtcctgcgcagtaatataaaggcggcaacagacaaaatgataccaatcaaggaaaccacgatcgcaggcgtcagctctccggccacatccgcgtatgacgcggctgaaataaccgtccagccgctatccagcccgaccctttgaaacgcatagcaggttggcacaagcccgtcaaaataccagatggtgccgctgtcttcatttttgacccgaagtaaagcagactccaagctttcgccaataatttttttgccctccagcctggattccaaggtaacgccgagaagagattcatcgttgcccgacatgaactgctggtcctttccgagcaggattgtatgcatcggctgagcacccaggaccgcgctcatctcgctgtcgtaaattgcggcgaataccgcgccgttgtttttggcgtcgccggcgactgcgaccgcaaccgtatagttgagcgtcgtgccatccgcgccggccaggaaaacgtccgtaatctgcggctcgttggtaacccacagggcttggatgtattccctgctgtttaaattagagactgccgcttcattatctgcacggtagacgccgccggatgtatccacagcccgtatcatctgataaccccaaatttcattataatggtccaggtgtgcggctttttcctgatacggaatatctcccggcagcatccatggctccccggctattacttcgagcagattcaatgtggattcgagattgttttcaatttgcccctgcgcgctggtacagctggaccttgccgccatgctgcaataccgcgcaaagcctataaatggccccaggagcaagcaggcagccaccgccaggcaaaatattcggcttattttccttttcatccttcatttccccttacataagattgaacgctttcatataacagctgaaccgagagcggtttagacagccgcatattcatcccggcatctaaaatctctttgttgtcttcctctaaaccattcgcagtgagcgccaggatggggatgctttcggcacgtggatggccggaagcgcgaatgcggcgggttgcctccaggccatccatcaccggcatccttatatccatcaaaattaaatcaacgggctcggcatccggattcaggaaatagtccacagcgagctggccgttttctacggtttttacctccgcgcctgcctgcttcagcagttcttccgctatcatcgaattgatttcattatcctctgccatgaggatacgaatgccgcttagagatacctgcggcggcgcgggctcagtttcacgcatggtctgatccgcgtctgcctggagaggaagcgccactgtaaaagccgttcccttgtccggttcgctctgtaccgaaatggtaccctgcaaaagccgtaccagctctgaaataatcgccatgcccaacccggtgccggtctgcgtccggccgtaggttgtgtcctcctgtgtaaaaggctggaataatatttcctggaattcttttgtcatgccgcagccggtatcggagacaagaatacgaatcccgcccttgtggtcctccgacagcgaaagggtaacggagccctgattcgtaaactttaccgcgtttgagagcaaattggttaaaatctgctgaatttttcgcgcgtcacccacataaaagcggttttccagaccggagaggtccacatgcagctcgattcctttttcctgaactgcggcgtcaaatatatgcgatgttttttcactcagattacgcaggtcgaagcgttcaggccgtatatccacactgccgttttcgatttttgccatatccagcacgtcatttacgatttcagtgagctgctgcaccgaatcttccatccggagcaggtactcttcttgtttggaagcgtccgcagcgctggttttcagcagatgcagagtcccagagattccattgagcggcgttcgtatctcatgggatacgttagaaagaaactgtcctttaaatacgctttccttctgtgcgacagacaacgccagctgcattttccggttcttatatatgaaccatacagcaacgaccacaatggccagaatacccgcagttaaaaccaatatcatcttaatctcattttccgtattcagcacggaggcgcggggcgtaattgtcagcaaggtccagtaattatagcccatcggttcgtaaaacatcacccgttcatcaccatacgcagtgtaggttaccaaaccggaaagctgcaggtccagccgtgtggcaacctcttccgccgtggcgccgttattgatatcgtaaacctccaaatcctcaatgacgttgtgcccttttttattttcaagcgtatcggagctgttccataaatgattgcccgcatgatcgacaatagaaacaaaggcgcccgcatccccatatgtcgtatctttgagtaaatccgaaatcgtgctcatcggcagatagccgtaaatagcaacggcatgcgaatcaccctgtccatcccacataatgcggaacagcagctcgtcctctccattcaccgcattctgcgatagcgtaaccgtgtagggataattgtgcacatccagaacatcgatgggttggtcaaacacctcaattttgccggtgtaagagcgggcggttccgtcatccagcacgaagccaatcccctttagagcggaattatcgatatagcgctggaaggtatgctgaatctcatccaaatccgtaatctgccggccgataagctcgctcttcaacaaaatcatctgttcggtgtatttgctcaggtggtctgagacccgatatgtaatctgctctgaaaagcgctcgaaagcgagcaggccgcgctcggtagaattattcataaaatatgagatggcatagaaaatactgacggtaacagccgccacatagagcaatagcagcaaaattgtacgccactgtttcttatttatcggtttcaagtagtttgactcctttcctgagctttgcagcaggctattccatccgttgtttatttccataacgcggttccatcgtaggccttcattgcggattccaaatagccgagccgcccgcattcttccagcaccaaacggtagatacgcgtaaacgcccgcacggtttctgcagggaacgcttcttgattccctgtagaaagcgcgtgaagcgccgccgagcattgctcatgaatcgcgcagttcacaggcgttttttctgtggtcaacagtccagggatactgcggccgattcggagattccttcgcagctgcgcataaatggcgccaagcgcttcaacaccgagatgctcggtaataaaatccagaaggaccgccggtgtgcgcccgtacagataatcctcgttccaaaggcggccgatttctgctttcgccgtctctatatctgattgggtaacgtttgggacagcacaagcggcggcgccctctacggtcagcgtcagcagctcaagcgtgtccaaataccgccggacatggcaggcaatcaagcgaggcggcacctgcacctcctggatgccgtttttatccatctccacaaaaatgccattgcctcgaaccgtcttcacaacgccccattcctgtaggacctgtaccgctttgattgtcgtgtccacgctgacgccataaatcttttgaagctctttgtgggttggaagcttatcgcccttcttataatggccggcggcaatcaacccgacaatatccatatacacggcggaataccttacctccgaaatctccagcagcttctcaagccgccttctgcccaagaggaccacggaatcgggagcggccttaaaggcgggagctgcttcgccagccaacccatacaggccggacatatcgtcaaatttaacgctttccggggcacgtcccatttcaagggcctccataaactcccgcaaccgctcatagtacctggtcctggtggtaatatcgtcacgcagcggcctcaaatcggtcagtcctaagctgtcaacggcctgtaaaatgaaagaattctcatttcgggcgacgaaaaaccgataaaattgcttggataatttccaaaactgcgacgcgtttccaattctcatgttatccagaattctgcgcggaattttcaaatcttcccgcttacaaattgaaatcccatttttaattacggggtagcacagcagcacacccgttttcaaaacatcgcttgtgatatccttatcaattttttcgagggcaaacacggttgttttgtggcctgcatttcgattgaagctcaccacggggcgcttcctctgcgaggtttcaatgagaccctcgtcctcaagcatagccaaagcccggcggatggttttctccgatgtaccgaactccatgcacaaatcagcgcgggaaggcaggctagagccctccggcagcagcctgctgtcaattttattttttaaaatttgaaaaaccgtctcatacatcagcatatcaatttatcgcctttcgcgcggctaaattctgtcatatgggcaatgattctgcctgtttctttaaaacctccgtgtaggcgcttgtaatgtcacgcattacaaagggctttgcaatgtgtgcattcatgccgctatccaggcatttctggacatcctcatggaaggaattcgccgtcatggcgatgatgatagtacttttcgcatcagaacgtggaagcgcgcggattgcctgtgttgcgctgcagccatccatcaccggcatctggacatccatcaggattagatgatagaagccttccggcgcttcggaaaacagcgtaacggcctccttgccattttgagccctggttacgatggctccagcgtcttgcagcagggcgccggcgatttcaagattaatttcattgtcttccactaccaaaacctgtgcgccggccagtacggtgggctgttccgttttcggctggtcgttgttttgtcccgtcagctctatcataagcgccgcaatgccagagtgaaacaccggctggcacaaggtggcgtcggcgccgcataaagcggctgcggcatccagctcctcctggtcctgtccggtcagaataattttcaaattggtattttgggcctcttttcgaatcttcgcggtaaatggccgcagctgttgggaaacatcccactttacaaaacatatttcatagggagtaccacttcgtaccgccgcttgaaccatctgcagtgcggcctcctcatcggacgcggtatccgcctggaagttctcctttttcaatacgtcggcaagatgtgctttcagttccgcaacctcgttcacaaccaggacctgctggccgctcccgcagcgctccatgctttcgcccatgctgtcgggcgcataggcaaagggcagctcgacagtgaatacgctgcccacacccacctcgcttgaaacggagatagagccgcccatcatctccgtgaatttcttcgtaatcggcaggccaagcccggtgccgccgtattgacggacgattccgctgttttcctgtataaaggcttcgaagatacggcctatattctccggggcgattccacggccggtgtccttgacatcaaagcggagccatagcttatcctcgtcccgccgcagctcctcaacatataaactgacgtgtccctgtgcgggcgtaaacttcagggcgttggagagcagattggtcagaatctggttaagccgaagcgaatctccaacaagatactcagcaacctcaccgcgaaggaaaatttgaaagtcaatctgcttgctgagcgactgaacatggaacacagtcgccagcgtccgcaggagacggccaaaatcaaagcgctcgaaattcagctctatcttgccgctctcaattttggacatatccaggatatcgttaatcagggaaagcaggtggtttgacgacagcgtaattttatccaggcaattacgcatccggtccggttcgccaatatggttctttccaagctcaaccattcccatgatgccattgagcggcgtgcggatttcatgagacatttgagaaagaaagtcgctttttgaccggtttgccgcctcagcccgttccttttccatcatcagcagagcattgctgcgcttttcgttgtgccttaacacaaaaaagaaaatcagcacggtaacgagcacgattataaagattcctacgcccacagctgccataaatccgctcaaatatacaatttggtcgtttactgtttcgtacgccatgctggtcaccatgtaccagtcggtcccctgaatcggaacataatagaggtacacatggtgcgttccgacggtcagcagcgtcaaaccgctttcccctgcgtcgatagcagcgcggaaggactgaaaatcatagcccttgtcaaagctcgcctgctgctcatagatggtgaacaaattggttccatgtaaaacctcttctgagaagacgctcttaatcacaaaatccccattccgggttacgatatttgtataggaatttgtttctttcatactgtccagcccaagcttcaatccaatatcagaggtatgtattccaacaatcacggcgaccagccggcttccttgaaactgcacggaagccatggcagtacccagcaggattgtaccgctttcccaaatggtttcattgacagagataagctcttcagagcccgacagcaacttgtcaaggccggagattttcgacatcgcaggcacggcgccctcagacgaataagcgattcccttatcgctgatgaatgcgatgtgggcaaagttattgcctgtctgcgcctgcgttaagaaacgtttcaggcttgcttcatccttcaagtcgttttccgcaatcgcattggtgattgtacgaatttgggaaaactggctgtccaggttggttctgaaatggctgctaatctgcgtggtcatttcccgcaaataaaccccgctgatatttgtcaccgtgtgttctgatacctcctggtatactgttgtcgcgagtatgcaaaggatggctactatcagaagcagagcgaaaataaaaaacagcatgccgcgcttttggttcttttttttgagaggcttcaataatcccccatcctttccgcagagatggtttgtttattctttctgcgctaaatcacgaattcttccttccagtttcccgctcacggcggtctcccgatgctgttcgaaatactgcgctaaagcgtctttgtaaagcagccctgtttcttttacgagcgtcacactgccttttggggtggcgctgtcgtaatagttgagcatcgtatagccgtccccattcccttcagcataggttttagagccggccatatagtcagtcaccgccacctggtagcttgcgttttgattcagggcagtcccatcaggcattgtcacgctaacaagccggctgccggccggtttgctgctgtcaaaaacataattcattcccgaaacctgtaaaaaccgtccgccggggaactctaacgtacaggtagagactccgttttcaagcatatcccacagggttttcccatccattttcaggacgataacctgattgtcaaaggggcacaccgcggaggtatccccgccatagaccacaccctcgtaaaagctggcccgaattccaccgccgttgaccactgcaatgggagcgccggaggcctcggctacgcagtccgctataaaattgccgatttcagtttcgctgcgtctcacattaaaattttgaagcagcatgtcatggcttattgttccaatgaccgtgaaatcgtaggaggattcatccgttccatcaaaatagaattggtcaatcgcctgtaaggcttctttaaccgtgcatttgtcagataggatatttctcacgtaaccgcccaggtattccacagttttacttggaaacagaacgttgtaaatatatcccgattccacatattcttctacgccgtttggaatcaaatcctcctgctgcttataatctgtgaggcaggacttgccgccgcccaaatcctcaattaacgcatcctggccttcaggggtcgaaagcaagtccaaaatgcgcctgcaggcgtcctgcttatctttacttatggtcttattcacacccataagagcggaaggagaggacatgaaccagggctcatttcctttgtcgctgagaagcggcagcatccggtaggtatacgcctttgaagtaccttcctttaccgcttcctggttgccggcaacgcactcataatagagtgcggaatcgccaaacgcagccgcgagggttccgttgctcaaacgcttctggcaaagaacggaattgcgctggtgagcgattgcggcggagtccataacacctgcggctacaagggaatctgacagtgcaaagcaccgctcccaagtaccagtaaaggccgcatctttctctttaaaatctgccagccattttacgccctcgaccgtcccaaggaaatcaggcaccatgtatccaacatagaacatccccaccgaggtattataatcactcatgatggaaaagttaatgccgtcatcacccacgccgagccctttttcctttaattcggaaagcgcgtccaccagctctgtattattggtgggcaaaggcataccggcctgctcaaacagcgtttcattgattacatatccgctgtacacgccgggcagtggaatcagataggtttttccttccagctttgcggcggacataatggtgccttcataggccgcgctggcctttgtatcgctgatatccagtaaatacttttgcaccagatttgaatcgggctgagacgcaattaataaatctggccctcctcccctctccaaacggcgaagctgttcactggaatagggcgatatttccacttgcaggtcaatatcatcataggtggattccactaatttctccatctggttaaaattgttggtgtaaagcatttttatcacggttttttccttcggcgcttgctggctgcagcccgccaaggccaaaagcagcagggagacgcttaagatacaggcgattccctggggtatactgtgtttcatatgggttcctcctctttgatttctttagaatgagaagacaagactccctctatggcgcatcataaaaccgccgccgtcaatttctccaaacctgtttacagacacacagaaacagctcttcaaagtctactgtttttctgcgccagaacagttcccacacttgccgaagcctcaagccatcgtaaatgctatcgtaggaagcatttccaagtttattttggaatcatccgcagcaaggattttctttttttgttcatttagcatcgcctcccgcaagcaattgtgaaaaagctgcctgcatatcccggtatgcttgtttaaattcagcaaatgccggaccgatattgatgttatctttccggtcgcgcagggtttctgtaagtgcgctcgccatttcagccaaaggtgtcaggcccatattgagcgcgacgcccttgagcgtatgcgcccctcgaaaagcagattcataatcacgctgttccagggccgtacagagggcagcatagttcgtatccctcagcagcatgccgaccagccgctgaagcatcttttcatccacccggcggctcatttcctcataatttccgcccagcttttcgtaagcttccctgactgtcatagccatccatacccctctcaatttaaaacgcaatagccactggctcagcgcattatatatcagatttttaatataagaaagaaaaatttcttggacccttatccagattattataatgcatagattcctctcttgcaacaggaaacggtaatttaacaagataaacgctggttttcttaaaaaggtattgaccagaagctgtataattctgaattcatctgtaaaaagcagggctatcctaaattagatagccctgctttttacagatgaatttactttttcttgttgcattaccgggatgtgcagtgtagccttggctgaacagttcccgcaagaagctgaaattctatggcgcagccttatatggtgaagctaaatctgaatattgattacagatttggttgagctttccacagtgctatgcagatggtttcagccgcataagggtcaaaatatcaacaaaaaaagcgcccattgaaatggacgcttttggcggagaaggagggatttgaaccctcgcgccagttacccgacctactcccttagcaggggagcctcttcaccacttgagtacttctccgaattggtgacttactattgctgttattgttgaggtgtttggcggaggggaagggattcgaacccttggtccctttcgggatcactagttttcaagactagctccttaaaccgctcggacacccctccgtgcggtgcgcaggtaatatattaccataaaggtcatgcgctgtcaagagtaaaataaacgtttttccatgatagaaaagcttgacaagcgcctgaaaatcggctaaaatattttagtgacattttttgtgcccatagctcagctggatagagcgaccgcctcctaagcggtaggtcggaggttcgaatcctcttgggcgcgccattgctaaaacctgccgaaaagccaagctgcgtttgaggcaggttttttatttgtaaaatacattttggaggctcagatggacaagtgggaatattcaactattgcgtttgacccggattccaacgattggaactgcggagcttttaaccagcaattaaatgtttacggagcacagggctgggagcttgtatcttgttttggtacagaagcaaagataaacaggagcttcgctggaattatttcaggaggcacagatatggtgtttgcggtctttaaacggaaaacccagtaatataattttattattaatttgatgccggataacattttagggttatccggcgtttttgttgtttattttaaaaagccctcaattatttttgcttccgcttcttcttcggtaaggcccagcgtgcggagctttaaaatctgttcgcccgcaatttttccgattgccgcttcgtggataagctgtgcgtccacatgggaagcctcaagtgcgggcgaagcgtttaccctgccgttcccggcaatgattgcgtcacactcggaatggcctgtacagcagttttgcccgcgcatccacgaaacgaattcttgataggaatttcctttggcaacggagcgggatattaaatctgctccggagcctacgccctttaatgttactttaaaatcggtttttgccctttcattgccgtcggtcataatgcgttcccgcacggctaaccgcgcgcggtctcccagcacggcacttgtcttcctgacggtgctgtccacgccggaaatttggattgtgtccatctcaaggtatgcatcctccgcaagcgttgcgtcggtaacagggtctattctcctggcaccgtttcccgcgccggttcctacatgcttttctttatatagtacgtgcgcgcctttttcaagataaaagcgatggattccattatggcgcgcctcttcttccccatcagtatggacaccgcagcctgcgacaattaaaacgtcagcgccctcgcccacataaaaatcgttgtaaactaggtcgtcgattcctccccgcgtgacacaggcgggaatatagacggtttctccggttgttccgggcgcaatatggatggcaagcccaggcgcgtcctgtttcgactcaattttaatattccttgtggactgcctgccggcacactggccattttcccggatattaaacgcgccctggaaggtccctttaaagccagaaacgatgcgcagcaattcgtctgttattttattcataccatagcttccccctttccgagcgggcagcgtcctgccttttcgtccgacagcagagtcggcagcaccttggatttgacgccctgcgaacgcacacatccctctgctatgacgacaatctcgtccgcaatagacaaaatgcgttcctgatgtgagataatgagaagggtgctgtcccccttttcgtgcaggcttttgaaggtttccaccaaacgcgagaagctccacaggtcgattcccgcctcaggctcgtcaaaaatacaaagcttaacgccgcgcgccagaacagacgcaatttcaatacgcttgatttccccgccggaaagagcggcgctcagttccctttcgctgtactcgtcggcgcatagccccaccttgcccaaaagctcgcagacatcttcttccttaagtctttctcccgcggaaagctccagcaggccgcgtacagtcagccctttaaaccgtacaggctgctgaaaggcataaccgatgcccttttgcgcgcgctgcgtcacattcaggccggtaatgtcctctccatcgagcaggatacgccctgaggaaggcgtttcaatccccgcaattagttttgcaagcgttgttttgccgcctccgtttgggccggtcacaactaccagctttttgtccggtatagataaatcaacatcttttataatttcctcgccgcctggaagctcccaggcaagatgttccagcttcagcataacgttttccttctttcaggccggttttttaagcctcgtttttgttttgcgtcctgagagcccgcatcgcgtttaatatagcaagcacagaaacgcctacatcggcaaataccgcttcccacatatttgcaaatccgaaagcgccgagaaccaaaatcagaagctttactgccaatgcgaaaataatattctgccgcacaatccgcagcgtctttctggaaatgcgtatcgcctctgctattttggagggcttatcgtccatcagtacaatatccgcggcctcgattgccgcgtcagagcccatggcgcccatagcgataccaatatccgccctggataaaacgggcgcgtcgttgataccgtcgcctacgaacgcaagctttcctttttttgatttttcattcaaaagcgcttccacacggtctaccttgccggctggaagcagctcggcgtacacctggtccagcccaagctcctttgcaacgctctcgccgacaggcttggcgtcgccagtgagcataacagtttttcgaacgcctgcctgctttagagccgcaatcgcagcggcggcgtcttctttaatctcatctgaaattacaatatgcccggcgtagcttccgccgacagccacatggaccgtggtgcctatgtggtggcagggatgccattccacgccgatttcctccatcagcttgtcgtttccgacgctgacgtcctttccgtctatcttggcgcggacgccgcgccctgagagctcctccactccggttacgcgggtattgtctatcgtcatggcgtaagcctctttaagcgaacgggatatcgggtggtccgaatagctttccgcaagcgccgcaatctcaagtaagtctgactcggaaattttgtcgggatggattgcggttacgttgaacactccccttgtaagcgttcctgtcttatcaaacacgacgatttcagaattggcaagcgtttcgagatagttgccgcccttgaccaggatgccatttctggacgcgccgccaattcctccgaaaaagctgagcggaaccgatatgacaagcgcgcacgggcaggaaataaccagaaagataagcgcgcggtgaatccagtcaggccagccgccgccgagtatcagcggaggcagcaccgcgagcaggaaagcgccaatgactacgcagggcgtatagtagcgcgaaaaacgtgtgataaagttttccgcctttgcttttttagcgctcgagttttcgaccaaatccagtatttttgaaacagtcgattccccaaaggctttcgttacccgtacgcgcagcaggccgctctggttgatacagccgctgatgacgtcgtcgccgggcaccacctcgcgcgggagcgattcgcccgtaagcgcagccgtatttacagccgaagcgccctcaagcaccaccccgtcgagcggtatacgctcacccgctttgattacaacctggtcacctacggaaacttcttcagggtctacctgtataagctttccatcacgctcgatattcgcgtaatcgggccgtatatccatcagcgaagcaatagaccggcgggaacggcccaccgcatagctctggaacagctcgcccacctgataaaagagcataactacgacggcttctggaaaatcaccggtaaaaaaagcgccgactgtcgcaatcgacatcaggaaattttcgtcaaaaatctgcccgtgcgctatattgcgcaccgccttccaaaggacgtcccatccgatgacgccgtatgggacgagaaatatcaaaagccgcagccagccgcccaacggcagaaacagcgccgtaattaaaaacgcgccgcttatcaggatgcgcaggagcatatttttctgtcttttattcataaccgtttctccttttgtaaaatttagttggaatcgattcaaaacagcccaatttcccttttaaattaaaatctcacagtcaggctccacacgcttgcaggtttttacgaccattttcatgatattatcaaagcacgcctcatctgcggccagggtcattttctgtgtcataaagctgacggaggcatcctgcacgccgtctatttttttgatggcatcttccatttttcttgcgcagttggcacaatccaaatcctgaagcttaaaaacctttttcataaaaaacaccccataatacaattttattattttttttaaaatagaaattactcttccacatgctctattccctgattgatgatactgcgcacatggtcgtccgcaagtgaataaaaagcattttttccttccctgcggcactttaccagcttattcgttttaagcacgcgcaattggtgggaaaccgcggtctgcgtgatgtggagcagctgcgcgatgtcgcatacgcaaagctccgcctcaaacagcgcatataatattttaattctcgtggagtcgccgaacaccttaaacagctccgccaaatcgtaaagcgtttcatcctgcggcatatcggctattaccttttgtacgacatcctcatgcacacatagaaattcacagcgctcttcctgtgcgttattcatccttcatcttcctttcatatgttcatctattcatatgatattatgttcctttgagattgtcaatgttttctttcaaaaaaatgaaaaaactgcgtaaataaattacgcagtctgaattgtttatgtaataagttaaaaacatgcctcctgtttttgatgtgacgattactccccctcagaaacagcacgctttaggccgccctgtttccacgcaaggcagtttgacaaagcccttttcagttgccctatcgatatcggcttggcgagatgcccgttcataccagcaagacgcgcgcgtttcatatcctcggcaaacgcgtcggccgtcattgcgataatcggcagcccgctgattccgggcagccctgagccgcggatttcacgcaccgcttcatagccgtttaaaaccggcatctggacatccataaaaacaatatcgtaatataaaacgggatggctgcaaacggcgtctaccgcctgccggccgtcctcggcaatttcaacccgcgctcccagaagctcaagcatttcagccgcaatctggcggtttaattcattgtcctcgacaagcagaacgcaaaggccggaaaagtccgtctcctcctggttatacgtttcctcaggagaagcgctcgacgggctgccgcatttgtcaagacatagggtaattataaagcgcgacccctttccatattcgctttcgacgcgaatatcgccgcccattattgaaacaaggttttttacaattgtcattccaaggccggttccagtaattttgctgatacggctgtcggccgcacggctgaaaggttcaaaaatatgttccagatattccggcttcatgccgattccggtatcttcaattacaaaacggtaggtgccgacattctgctcctcttttttcaactcgtccagcgaaaatgtaattttcccgccttccccggtatatttcgaggcattttcaagaatattgacaagtatctgtttcaggcgtattgcatcaccaagcacacgggcatggagtccttcgtctatctggaccgaaagctcctgtttcttattttgcagagaaagccggattatttccaccgtttcccgcgccagtgtccgcaaatcgaattcgttttctgaaagctccgtcgtgccgctttcgattttactgacatccaaaacctcgttgatgagctccagcagatgcttcccggagccttctatctttttcaaatagcccttgagcttttcttcatcgccggtatgcagctgcgcaagctccgtcattccaataatcgcgttcatcggggtacggatgtcatggctcattttggaaaggaaatcgcttttcgcttcgttcgccttctccgctttctgcagcgcatcctcaagcattagctttgccctgcgctctttttcaatcgcttccttctgcaggcggcgttcttcatcgatattcctggatagggtaatctcaatcatgtcatcggtataagggctttcgacccgcaccacctgcgtaaagttccaatggtaaacgccgtcttttccgagatggggtacttccatcgtcacgatgcgctctccgttcgtataagcgtcaatcaggttctgacgggtaaacttacgcaggaattcatcccggtaatccggatggacggtagcaagctcagtttttatcaggttattaaaacagccctcgttttcaggcttttctactgggtaccgctggtattcgagcatatggtaggtgttctgggtcaggttgaccgctatcagcatctggtatgcggctctggcggcggtcgcaagctggctgatttcaacactgcggcgctgctgcattaaatattcatcctgaatgtcccgaaatacaaggacacaccagcattctttttctccgagctgctcaatccgcgctgcggtaaattccaccatatggtaaacattttcactggttaaacggcgcaaacgccttgaaatctgttttttaccctcaccgaacaaacgaagcatcgcttcgcgggaaaagctttcaataaaggcctgaaggtcgttcggatgcagcgttttttttgcatatttacggttttcatcaccaaaattcccctgctgcggaatatccgtccacatgatatccttctggcaattaacataatagtcggcggtcagatttgcaatgatgcattcatcaaaaacggtaacaaggctctgtgcgtacatatgcttgattttttgcaggccctgctcctcttcaaagttcagcctgtgcggggtagcggttattacgacggcagggatattcccgtcccaggcaatccggttggcggtaacatcaaccgtggttttcagcagagggtcataacaaacgatatggttactggggttctcgcccattccattaagcgggcaatttgagcatacctcgggccaaacctcatggcatttagtcccaagcgcagcttttcccctgccggtttccctgcagcgcttattaaagtacagcagacggtgagtttttgcttcaacgacataaacgctggtttcggtcagcgcgtctaataggtttgccagattctcagcaggcattatttccactccccgttttccgcttcaaaatctaaaatatatttttattatacacgcagagccgttaaatagaaagttttttttaactgctccgccgccgtaagtttcccatattaaaaaacgacacaaaaaaagcgggccgtcacggcccgcttcacatacctgtctaattgcatatcggttttatatttgccgtttccccgacgtttcaacgcacggcggctgtttttcctgcgcttcttttgggacaagctttctcatgtatttataaacgctgacgccctcgtattttaaacggaagcggacgttcgcctcaaaatccagcttacatgcttcacataaaaaccgagcgcgaaagccgttattaaccaccttccaggcggttttctgtttcagccgcctgccgcattttttacaaaacatgaccatctcttttttatcgattttggggtcgttcaaattggtaagcgcgacggttttaaacaatatctttttgtagaactcctcattcattggatgaatcatttcagaaagtatcgatttgttctcctctttctgtaaaagccggcggaagcaggcagcctccagcctgctgtctgcaagcgcgcggtggagcgtttgctcgtcaaatttaatttcaagctcctgcgcggcagtcgagagcccgatttgctttgcattctcttcaaaatggaaacagcgttcacagaatttctgcaaatccacgtactgccggacgaagtcaagacgttcattattaaggaaatactggcagtttgcaagtaaagtaagaatgtccatattgccccaagccatcagaatacagccctctgcaaagctcctgaaccgttcgagtacatggggaaaggtatctgcatctttcaaatcctcattgctgatatgcgtaagcttctcgacaaggcttgtgagcgcctttccaacctgtggtcttaccagcatggaaaaggtctcgatttccttataattttcatcgagcttgaccgcgccaaattcaataatttcatttaaatggctttttatacgggcgctataggcggtattccactccaaatcgagaattacaaacatgatatccgaccgttccttaattcttaaactgtttcttcatccgctgctctttattgagaatcatcttccttaggcggatattgtgcggcgtgacctctaccagctcgtcatccgcgataaattccagtgactgttcaaggctgaggatggacggcggagtaagctttaaagcgtcgtccgagccggacgcgcgcgtattcgtgatatgcttctttttacaaacattgacggtaatatcctccgccttggggcttgctccgacaatcattccctcgtatacgggaacgccggggccgataaagagccttcctctctcctgcgcggcgtacaggccatagccggtagattccccggtttcgtgcgcaatcagggagccctggtgcctgctgatgatttctcctttaaaaggctcgtagccgtcgaacacatggttcataattccgtttccgttggtatcggtcaaaaattccgaacggtagcccatcaggccgcgtgccggaattttaaattcaatatgcgtcgtgccggattcacgcgcgcccatattgataagctccgcttttctggaacccagcttttccataacggcacccacataattgtccggcacctcaataatcaggtattctatcggctcgcagagcgttccgtctatttttttcatgataacgctgggccgcgaaacctggaattcatagttctgccttctcatggtttcaatcaggatggaaagatgcagctctccccttcccgaaaccttgaaggtgtcggaggtttccgtttcctcaacgcgcagcgcgacattcgtttccacctctttaaacagcctgtcgcgaatgttgcgggaggtgacgtatttgccctccctgccggcaaacgggctgttgtttaccataaacatcatagatacagtcggttcgtctattttgacaaagggcagcgcctccaccctgtcgggcgaacaggccgtttccccaatgttcaaatcggtaatgccggaaacagagacgatatcgccgagcgaggctgattccgtctctacgcgcttaagcccttcaaactgatagagcttggcgattttcacattcctggtactgccgtcacggcagcaaagtacggcgttctgcccatttttcactgtgccgcgctccaccctgccgataccgattctgccgacgtagtcgtcgtaatcgatattggaaaaaagaatctgcatttccccgtcaaggtcgccctgcggagccggaacctcttttataatcgcttcaaagagaggggtcatgtctgttcccggcgtattggggtcgagcgttgcgtagccatcgcgtgccgacgcgtacacgacaggaaattcgagctggtcgtcgtccgcgccaagctcgataaacaaatcgagcacctcgtcgacgacctcctccggccgggcgcctggccggtcgattttatttacaacgaccaccggctttttgccgagccccaacgccttctttaaaacaaagcgtgtctgcggcatacatccctcaaacgcgtcgacaagaagcagtaccccgtctaccatcataaggatgcgctcaacctcgccgccgaaatcggcatgcccgggcgtatcgactatattaatttttgtaccgtcgtacatgacggcagtgttcttggaaaggatggtaattccgcgttccctttccaaatcgtttgaatccatcacacgttccgcgaccgcttcgttttcacggaagatgccgctctgccggagcagctggtcgaccagcgttgtttttccgtgatcgacgtgcgcaataatcgctacgttgcgtaaatttgttctctcacccataaaatccctctaatcgctcttttccaagcttttctttttatttctaatttataattgtatcatatataacacagtttttcaattgcataagggaaatacggaacgtttcgtctatctgttccgtatttaatcctcatttgcccttgcatatggtattctgtcacatacctccgctaccttatcgcgcatccaaagtcccggagtgacccgcagggtatacccaaagccgttgtccatccgccagtcatacggctgcgcctgcggcaggccgtaaacggagaggagcgtcatgattaccccgccgtgcgttacgattgccgcggtagtatcgcctgtacgcatcaggtcattcacaatgcgttcaaacgtaaggcatatacgcttggtaaaggctgaaccgctctctccttttggaggagcgttatccgctgaattagcaagccaattataaaaatccatatccatagcaagctcttcgccggttttgccctcccactgcccgaaatcgcattcggcaagccccggctccacacgcggcttgagggcgggatacagtacgttgcaggtttgaatgcagcgcagcaaagggctggaatatagtatcggggttcccggataaacatacgtattatctgtctctttgagcttttctatcccttctttggacagcgggatatctgacgaaccaatatacgcgccttttctgttttcttcggtcaagccgtgccgaatcaaatgaatttggtaagatttcataataattcctccaaaatcttgttattatgacaataaatgaagactttacaaactgttgaatttcggatatactatatgtatagtcgtaacaattctgtaattgttttgtctttcttttttaaagattgttttactttagtaaccttaatttggggcttatttgtgggggaaacgatgaacaaggacttttcaagaatcattactttgctgcggaaagagcgtggcttaagccaaaagcaggcggcagccgacctgaatatttcacaggccctgctttcacactacgaaaagggaatcagggagtgcggacttgatttcgttgtgcggacagccgattattacagcgtttcctgtgactaccttttgggaaggacgccggaacgtaccggtgctacgctgactgtcaacgatatcccggaggccggcaataatctgcctgaagggaaagtattaaaaggaaaccttcttcccacgctgaataaaaagcttttgctcaactcaatcgacgtgctgtttgatattttgggcaaagccggcagcaaaggcctgacgactgaggtttccgcttatctgatggtttccgtatacaagatgttccgtaccgtttattccgccaacgccaaaaatccgcagggcctgttctccattgcgccgcatttatacaaagggttttcctccgctgtccaaagtattgcagaggcaaacgcttccgcaatcgccggcgggcatcaggcggcgggctttgacgggctgagcaaggacagtatgccgctgcttacgcctgagagcatcggggaagaattcccgttatatgccacttccctgtttaacctgattcaaaccacagaaggaaaaatgaatttaaagctaaaatcataaatacaaatacataagaaacgggcggcaaaaatttgccgcccggattttttgcgcagttactgggaagcggaagcgccgccctgctcggaagaagacaggtcaggcttgttccctaagcttactctaatcgtaatttccgagccgtagtcgagtttctgtccttctttaaaggtcttttcatacccaatcaccttattttcttcaaccttatcgctgaattccaaaacggtattggtgataaagcccgcctctgcaagcgcctgcgccgctttatcgagggataggccttcaacctttggaagcgccctttgctttggccctttgctgacggttacggaaatcgtcacgccgtcgtttcccctgccgacagtcgtcatacccgccggcgcctggctgcaaatgtagccctcgggaatcgtatcactgaattcgtcgctcgttgtacgcacaacatagtattcgccgcttgcttccgcagcttttacgacatcttcaaacttttgattaacaaaattgggtaccctgaaatatttgctgtccttcgggtatgtgtagtcctcgggaatagagttgtcggaaggtgatgttgggtcggaagcatccgacgtaccgggcgaagggagaaacattccctgaaaaggattggatgaaatccagaaaaagcctgcaacagaaaagattatcaatgcgactacggccgcgataacaccgtaaccaaaatttgaaagctttttcttgccggctgcctcctccgtttgcgggataaccgcaggacgcgcaatttcctcctgaatcgctttcactgtaggagcggcggaaagctgcgcgcgcagcgtttcaaagtcaccaatacgtatagaacggtcgacctgcagcccgttggcaagcgcagtaatgacatgcggcggaagacgcttcactacatttgtactgattaaaagcctgccgtcttctttccttttccgcgcgtcagacggcagctttcccgtaagcgcatagaacagggttgcggtaaagccataaatgtcggttgattcatcgagcttctccgaaggctcatactgttcaggagcagagctgccggaataaagctgggcaggaatccccttcccattctgcctggcggcgggaattgaaaaattatcgattttcattttaccggaaggtgcaatcacaagattttccgggctgataccaagatggaacaggcccttttgatgaatttttgacaaagcggataaaagaggcataaacagcggacgtgccgtgtcccactccagagaaccgccgctgcgttcgatatattctttaaacggaatatcttcctcgtggttctctactacataggaggtgccgttttcattaaaaatatcaaatacgggaataattgcggaaagctctttaaaacatgcaacattcctgtggaggctgagaaaatcctgcatcagcctttcgtaagtttcctgtttatcaggaattacaatgacatcgggcgaggcagcgtttcgcgtacaaattcccgcgggaaaatattcgcgaaggataacagccgaatcgacgctttggtcaaagccaatatattttatatattccgctgtactgccgaggactcgtccgacaatgtattttccctgcaagactgtccccaagggcagaaacggcggaagctgttcagagtgtttgtcaaatccacagctgggacagatgtcttcgccattgttcttcgccatacatcccaagcataattcagacataacgacaccttctttttgattattcagttcattatagcacaggaaaacaagcaatttcaaccgcggcatacgtttatattattacatttttgtaaaataaaagggattgttttctggtttttctgcaaaagggcagctttacagcgtatttttttacatgttcagttttagacggcgtccgccttacttatgaaaaaatcaaaaaaaacagaaaaacatcttgcaaaaagattggcaatatgataatatattgcttgttgtaaaacggaacactttatgggggtatagctcagctgggagagcgcttgaatggcattcaagaggtcagcggttcgatcccgcttatctccaccagaacaagtcctgtattgcttttgtgatgcaggacttcatattacggaagcatagctcagctggttagagcgcctgcttcacacgcaggaggtcgctggttcgagtccagttgtttccaccatgttttgagacaagcctacggcttgtctttttttgtgcctgaatgtagaaaggtaagaaaaatggggacgaattccttaacggaatccatcccctctattcattcttctaaactgaacatgtataaacccgccataaccggcgggctgtttttatttaaggaggaactttatggctgcaattcaggaaaaaatggcaagcattgcgctgaacgagattggaaacggtccatcaaaatacaggaaatggtattacggctatgatgcaaaaggagtgccgtggtgcgccgtgttcgtgtcgtggcttgcaaatcaaggcggcgctttgaataagtacattgtcaagacagatggtgccggctgctttgcgagagagggcgtagcaaagggctggggcaaatggtatgagggcggctccactcccagggtcggggacgtaattagtttttgctggaacaacaagggcgattatactgatgaaaaccaggataagtatttcagcgaccacgtaggctttgtcgtttccgtgtctggaaatacactctatacggttgaaggcaatgcgggcggtactaacgatacttccaaggtacagaagcgttcttacccgattaacagcgttaaaatcaacggctacttcaggccgaattatccggctccctcctctgccccgtcaaagccggatacagcgcccgcagccgccggcaagactgcaattaagcaggtgcaaacctgggtaaacaaaaactatggtacaaaaatagccatagacggtatcttcggaaaggatacaaaggccgcttacgcaggggcgctccagtgttacttgaacagcagatacaaggcgaagcttgccgtggatggtatatttgggacaaagacgaaggccgcaatcagagaggtctcaataggcgcaaaaggcgattacgtctatctgcttcaggggatacttatttgccgtggttattctacaaacgggtttgacggcgatttcggtacggggacacaatctgcggttaaggcgttccagaaagcatccaagattgcagtcgacggtattgcgggaaagaatacgtttgagaagctttataaataaaggagtgattgctgtgaaaatcaattggaaggtaagattgcagagcggtacgttttgggctggtttggtttcgcttgtgctcacatttgtttacacattgctgagtatggcgggcatcgtaccgcagtttgagcagaagcagattatggatgtcgttattatgctgcttcagattctcgcgtttgtcggtgttgtgagtgacccaacgacgaagggtatcaatgacagcgagcaggcgcttacatacgagaggccgagggacgacagcaaataaagcatatgaaaagttaaggcagaggattttattcctctgcctttttttgcgctatttgaggtcgatgacctttttaatttgacataaataatcaaacagctataataaatacaaataaaaaaataaataggtttattaacatatggaattccatttgattccgcctgacgaaaagctatgtttaaaagcgattatgacgcagcattcgaaatagaggatggtatcagtgtacaagtcaccattgggtgcggtgaagtctccgaatatatacaaaacgatgatggtgactatgaaatgtcgattggctcttctgtaaatttgattgtaccagaagaaatatttccgtttttattgcgtcccatcatccaagggagggagtattataccctaaagcaaatcataggtgaaatgacaggccaacgtaccttcctgattcacgattttgaaaatgatgttgatattcgggcagctgttgtaatagaggatggcggatatgctttttcccccgtggttgtgtctgacgacaaaaaggccatagcttatacagggttgagttaccggttagaagactatggcgatacatgggctgcggtttacgaggattgataactgggagaattaaaggctaagggcagaggaataaatcctctgcccttagcctttacatcttcctactaaagtttagacttattcaagactaacaaaatcttttacttccatattttctcttatttccatatgctctttggttttgagcggtcgtttgtttctgcaatcattgcaattgaagaaaaaaggaaataaaaaagaaagttgttggaatcagaataacgcattgtattttgatcaatagagtcaatctcttcttatcgggtttcatatctgtatccctaattagccttttataatgctggattgtgataggtataaagccccaggcaaacaagtaaatagcaataagcagaaatatcaaatagtatatactcacacttgacagtatgttgggattaaatttttgtatacaccgaaaaattattacaaaacaggataaagctaacggtaataaaatggagaattctgttaactgctttaaatttcttgggaactgaattttttctttatgactctttgggattgacattcaggtttacctcctgtaattaataattaaataattccgtttctcctgttttcttctatgaaactctcattaactgcgcttgttattaggaatgttaaggtactatacattaaactaacagcaactccgccccatccaagaggattccaacaattagcaattgaaaaagctaataagacaccctctacagcatttagtgcctccattcctgtcaaaatccatttttgtgaatttgtaagagaagggttaatccaatgaaaggtcatagctacaggggcagttacagcatatgatgtacccgataatgttgccgccccagcagcatccaaatttttccctacaacatttactgctgtctttacgcctccaacaaaagcatttgatatattttcacctgtattaaatttatcttgtttcggtgtagtattagttgtattattattatttggctttttgggtggcttacaacaatcccaagaatggcaaaccgaacaatatcctgttaccatgttaacgggacacatcggtcccattcgtccgccttccaatgcatgacaccattctccggtcggatcaaaacaattcacaggattatttttgcaatagacattcatatttgtgtctagcaagtcatctcccgttttaaaatacccatccgcattcaagaacctatgcgtcaccgggtcgtaataccggctcatcaggtagtaaagctgggtttccttgtcgtagtaattagcctctgtaccggaatgggttcaggttacctacatggttctggtcgataattccattaccgcttgcgtcctttacactcttgaccttgccccaggtgtcgtaatcgtactttgctacaagctcgccattgccgttgtaaaggccaaccacgtccccgcgccagttatgagacgcgtagtacgcgtaatcctgtccgtccggcgtcaggcggtacttgatggcggtaaagtagccgtttgcgtcgtaatagtaatggaaggatttctcgcctctcgtttcatggatgagcttgccgtttaagtattggtaggtgtatttttccccattgaccgtcttcgtcgcgcgcacactgcttgcgtcatatgtataggataccgcagtgctgcctttttgtaaagtggagacccgtagccttaaaaagacaaggctgcgggtcaagttactttaaagctgattttgaataaaaaccttgtttcacttcttaaggattttttctctaaatgtaaccctgagattgctttgaagtagacaataaccaggaaagaataaatcaattactatccaacagctaaaacctttccatctgattcccggattacaatttcaagcacaccggtaaggccaaatgatttgccgtcttctgttattccgcctgtgcgggttctaacaacccaaacatcatatttctcataaaaagaggtttctaaataaggttgcttttgtttttcgaatatcttctttgtatattctaatattccactgtctttttccctccaaacggcttcggctttttccttggcatcctcttccgatgtgatgcgtcctaaatacctgttgggaagttcttctgctcgactcattgctgcagcagcagaatcagtaatttcgtctgccttaatatgtttataataatcggcatagaccgcttcaacgatttgcttgtcagaatatacggtaggtttagtggctttcgcagaactgctagctagtgactgattactgcttgctgggctattagatgattctgtctcttctggaatggccatacacgcacttcctccgatagttatgataagtactaaaatagtaatttttaaaaaattagtcccttttttcattttgttgcctccgttctttcttggttcatcttggtgcattgttgaaaatgataacatcgcttccagtcccaaagtcatattttcttacaacccctgatggcgttccaacatacgcatacaacatattatcaatcgaataagtatatttaaaatttttatcaacatcagaaaactgattgttttctggaacaacatactgaccatgtgtatgcacataagcaacagtgcttgcatcccaagttacagtgctactgccattagcatctgttctcacaggaccaatatccaattgtccaatcgtatacaaaatttttccgttaatttcgacttggttgattgccgctgcgtattcgcggcaactgctgattgattcggcaccatatagcaatacaaaatttattgcggcttcgtcaatggtattaaaatattttttgttactcggagcgggaaccggatccggttgcggtgctggtggtttgggattaggcggcggtatatacgaaggatcatttttaccgcactttttacagcagtaccacactccggggacgttgcccattgtcttccaatatgaccccatctgcgcaccgcaggcggaataggtgggaatccaacaagttccgcttgggtcaaagctatttaccgggttatttgcgcaataggtgcccatattggtgtctagaagcccgccgcctgcttgaaaatacccatccgcattcaaaaacctatgcgtcaccgggtcgtaataccggctcatcaggtagtaaagctgggtttccttgtcgtagtaatagcctctataccggaacggattcaggttacctacatggttctggtcaataatcccattaccgcttgcgtcctttacgctcttgaccttgccccaggtatcgtaatcgtactttgctacaagctctccgttgccgttgtaaaggccaaccacgtccccgcgccagttatgggtgacaagataggaatattcctctgtcttttaaaaaatatttaatatgcttttataaaacttaatttataagtattatctctagtatgagcatacacttcaaaatcggaaggtaacattccttcttctattttataaaattctcttgaataaacgccacctatttcctgctgtttcaaagggataaattctcccccttggcagtttgttatttttaagtcctttattgataaatcatccgttaaaagccttataataattaatgttttctcagtttccctatttgtcacacaagttgcagaatagattactttttcaatgtctgactccttgtttagcacaaatggattgttatttaatgcgacatctatcattccccatttatcatcaaattttgttatagtatgaaatgaagttgaattttcactcttcctgctaataataaatgcacaatctttttcttcaattatgttttgtattttcattcctcctgctgaataattaaatgcttgctctatggtttcaaatcttaggaaagatgattcaattggaaacaaaacaagaagcatatataatacaaccgaagatataatcgcgataaatattttcaatttgttccatttccatttccttttttttgatataacaataaacaaacatacaattgcaactacaactaatattcttattaaataaaacatcattattaatcacctcattaattataaactggctttggtgattcgtatggggttggaattcctgtcataatcgagcctattaccattatggtagtccataaatcaaatgcaattcctcctgatacgcttccaccttctattgctttatcccaacctaaattaattgaaccatcttttaatgcaacctctgctccgacccagtattcgtcccatgtgagtcctatgctggtagaatttactcctaaattaatttgcaaaccatatttcattcttaagcctatttctgaattaaaaaaatctccattattatggtgatataaggttaaaaatgcatcggcatctgtagattcatatgtagtatgactatacgactgtcctgtataagtttgcacaaatggtcccaataaattgtaatattgtttttgggatgttccaactgtctgttccgttttggcaaatacaaattccttatgcgacggatcacaatttccacacttactgcaataataagacgctccgggtacaggtttcattgtcctccaatatgaacccatctgcgcaccgcaggcggaataggtgggaatccaacaggttccgcttgggtcaaagctatttaccgggttatttgcgcaataggtacccatattggtgtttagaagcccgccgcctgcttggaaatacccatccgcattcaaaaacctatgcgtcaccgggtcgtaataccggctcatcaggtagtaaagctgggtttccttgtcgtagtaatagcctctgtaccggaacgggttcaggttacctacgtggttctggtcaataatcccattaccgcttgcgtcctttacgctcttgaccttgccccaggtatcgtaatcgtactttgctacaagctcgccgttgccgttgtaaaggccgaccacgtccccgcgccagttatgagacgcgtagtacgcgtaatcctgtccgtccggcgtcaggcggtacttgatggcggtaaaatagccgttcgcgtcgtaatagtaatggaaggatttctcgcctctcgtttcatggatgagcttgccgtttaagtattggtaggtgtatttttccccattgaccgtcttcgtcgcgcgcacactgcttgcgtcatatgtataggataccgcagtgcttcccttttgtaaagtgacgaaccaaaaatcatgatcaccagtgaactgatgtttttttgctgaagcttttttactgacccccggttctatcggggatttatttacgcttaagcaggaactaaaaagagcgctgcgaaatttccacagcgtctcttttaattgttattaggttttttcatgctatgatgctaactgatactaagaccaataaaaattgttttattggttagcattataaagaatttttaaatcctgttcatcctcagaatcgacattgatttttgttatttcgcttatttcaataatagttattccattttgtcgcccataacgatctagtttaccgatcgtgcacttctcatcatccacagaggtaataaatccagtacaatcatcacagccactatcaagcagttcaattgcgacaacaaattgattcttcatggcaaatttaagcattgcattaactaaattttcttttccaaaatcaaatttacaatgttgaacattattgaactttgaaagagtctgaatttttttctcgtaggaaccattaaaatcaagtttaaaaattctattagtttttctaagtaaaaaaccatcgtataaaccacgcggagaaatagattgaaatatataatctgtctcattacatgaagatatataccccaccccgaatgactcgatttcattttcatcaccgaaaatacttgttaatcgacacagcttctgtgattctaataattgttttaagaacatactacatctccttaatttctatatttcaaaccaaaaactttattcacctgtaaatggacgtgttatatcgtcccatattttttcccacactggtttatctcccattgggggattcaaatattgaagttgctcccacggagatgttatttcatttttttccataaaatcatcgagttcttcgggagtaataggcttatgtctcttattacttcgatcttctttcctttttttatcacctttttctttcttcaattgatctctttcattacgtgccatgccttgttcgtgtttatattttgtacttggacgcgcattattactatgatttcctaccacagcatcatcgtcataatcagaattaggcttcggcttttcaggaacaactctgtcttcaggataacagcagtccttaaccccgcacgaattgcaaaagccatcgtaggggctggtatggcagccgggatgatatttcgggtctccgctgtaatggcaggaggttcctgtagaatctgaataattgaccgggttatttctgcaataagaattcatattgacatccaatattgaattccctgcttggaaatacccatccgcattcaaaaacctatgcgtcaccgggtcgtaataccggctcattaggtagtaaagctgggtttctttgtcgtagtaatagcctctgtaccggaacggattcaggtttccaacatggttctggtcgataattccattaccgcttgcgtcctttacgctcttgaccttgccccaggtgtcgtaatcgtactttgctacaagctcgccattgccattgtaaaggccgaccacgtccccgcgccagttatgagacgcgtagtacgcgtaatcctgtccgtccggcgtcaggcggtacttgatggcggtaaagtagccattcgcgtcgtaatagtaatggaaggatttctcgcctctcgtttcatggatgagcttgccgtttaagtattggtaggtgtatttttccccattgaccgtcttcgtcgcgcgcacgcttcctgcatcatatgtataggataccgcagtgcttcccttttgtaaagtggcaagctgcctgccgttctgccacgtcatcgtcatcccacggtaggaaagcgggttgcctatctcatcatatgtaatcgcttttcctccgtatgacgtcagcttgtccttccagtttgtgtccccatacgcatagttcgttactgtactcgaaataacacggtcgcccgaccagatttcctgggtttctttcagcaggtttcctcccgcgtcataggcatactttttctgttccgagccggtcccgagcttctcgagcacgagctgtcccagctcatcgtattcgtaagcagcgacaggcgttgtatatcccgcttctgtcccgtcggcgtgatacgtcattttcttgatacttgtaatattgccccggtcgtcgtattcgtaagcaagcttttcgctgccgatggtttcttccttgattttcgtcgtcctgtaccggtcgcccccgtccgtgttgcgcttggagagccagtaaacgtaacccatatcgattggtttcgtcgtcgcaatcgaggtgcttttcaggcggttcagcgtatcgtatacataggtcacgttcctgctgccgtctatcgtgtatttctccggcaggttgtccttgccgtacacgtattcattctttgccgttttcccgtttgcgatgtttacaagctttgagacgttgttgttcaggtcgtacccgtattccagcgcgtagagccggttcccgctgttttccgtgcttaccgcgctctggcgcacaaggcggcccgttacgtcgtagtcgctgtcgtactggattccgtttattaaatcctgatggcgcgtgacagcgccagtccggtcggagaaccacttgaacgctgttgtcccattgtagctttgcgttgcgatgttcccgaacgcgtcataggtgaagcccacggattggccggttccgtatgtctgtttttgcagcagcccgttgttcgccccgtacgtatacgttgcgagcgtctggctgcctaccatcgtcttcgtcttgttgccgaaggcgtcgtagcttatcccgtagttcgtaccgttgtgcccgatacggatgaggtttttgccggtcgcgtcatacacatactggttcattacggtcgtcaagccgccgtttatgtccttcgacacgctcttgagcaggtcgttgtttgcgtcgtacgtgtagttgaccgtaccggagctgtccgacgcgctttgcagcgtgccgcggttctggtcgtaggtatatgtggccgcgttcccgtcctggtctgttgacttgctcacatacgccttgttcgccgtatacgaaacggttgcgagcagggacgcgctcttgcctgggttctgcacctccagctgcgttggtacgccggtatcattgtcgtaggtgtattcagtaatcatcccgcgctggctcgtcgccttcgtcatgttgtgctttttgtcatactcatatgtatacgcgtagcccttggaatcaactgatttcgtcaggtcggcgttcgtatactccatcgttcccttttgctcggcgtccttctgtacggtgatgacatggccgtccttgtcatacgtatagctctgcgccacgtccttgattagctggatgttatcgaaggttgccgtgttgatttggttgctatagttgatatagacctctattttggccggtgttttctttgcgcttgtcccgtcgctcaaagtaaacgcgctcgacgtgaactgccagtcggataccgcgctgttgaaatccgccgcgcgcttccagatacttgtaccgtcactgtatactacttttacagacagcttgaacttcttgttgttcccgtcttcctccagcgcggcgtttccctttgcccagccgctgacgatgtaggtgtcctcctccgagccggtcacgtttacgctctggtacagcagcttttcctttgaggggtcgcccgtaatcttaaacgcgtagctgcccgtgcgcgcgtccgtcgtttttacgtccggcgaggtcagcccgctccctgtccagccggtgggcagcgcgcccgtatagctttcgaggctcgggttttccagcatattgtaggtgtttacgatgttatactcttccagctgcaccgcgtcgaaatacaccgtgcctgtcgtgccgcgcagcgcgaggttcagcctcaccttgacggaatcagcaggcaccttgaaggtcagcgtcagccgcctccacccgccgttgattgaggtatccgtcgtactctggatgcgttccgacgcaaaatccgtcgccgtattcgcggaattgaacgacgtcgcgccaatcagcgcgcctgtattcgccgccgttgtattgaacccggtcgtcttgacatacgccgacattgtataggacgtgtccggcttgagcacgacgtcctggtacaccctgccgctcgacgtgccggttaccgccgtcgtgttgattttcatcgactgcttgcccatgtatttctgctcggtcgtatttgccgctgtgaaggtgttggttccgccccacgccgcagacgtccacgagcctgtggcctccatattgtggtttttcagcaggttgaccgcgtgggagccgaggttatactcgttcgttacacggttgatcatgctcaggttgcttccgtccgcattgggcgctccgctcgtatactggcagccggcagcccccaggtcacggttccccgtctggctcttgatagacatcgtcctgccgtaatcgtcgaactgcttggttgttttcaggtcgtcagtattgccatagacgccatccacgccggacgtctggactacggtggaatttttcctggtgcggtcgaacgtcaccttctgcccggccttcccatccgtgccgtattcctgcaccgccgtcacctgcttgcccgcggcagccgaggaatagctgaagctcaccttgtagccgtcgatatccgtgacgcttgtgagcgagccgtcgttgtcatagttaaagtacacgctcgtgccgtccgcgttcttaatctggctcatatacccggaatgccctgcttccgttgtatagtagaagatgcactgacgccccgccgggtcggtcatgcggcttaaagagccggagccgcttgaattcggcacaaaggtgattttttggcccgcgccgtcatgcacatagaggatggtcttatcgtctgtatcatactttacatagatgaactttccgttggcactgatgattttccgcagcagcccgttcttatggaactccatcttgttgtctttttcgtccgttatgacgtaccgcgcgacggtgctcgacgtattgacggtaagcttcagcttcccaccgtcctcgattacatattccgtcttgccgtccgttgtctgttttacgaaatagcgctccgttgcgtcgctgtccgtgtagacatacgggtagtttttagccgcgtcccctgtcagcccaaactggctcgacggctgtaccgtctgctggatactgagcttccagcccttgcccgtaagcggcggcgcttgggtatacgtcacattcgccatgtagttgttgaacacgtggctgatggaaagcggcattaaatcgccgcctgtggaagcatcgttgtgcacgaacacgaggttgcccgtatagtcgttcacatacgcggttccagctgtacccacgccaaagctcgtatatgtccagtaatcctcgagccccttgttattgcggtagataatcgtaaaggcagggcgggggatggacgattcagggaaatttgaggagtagaaggacgcgcactgtgcgtttgcggcttcgtccaccggctttaacatgatgccgttgttcacgtccccgtcgtaccaccgcttgacgctcttcgttacgttccactccacccatgggctgtccttggaaacgtccttgtacagctttgtatagtccacgatattcgcttcaaagttcggcctgttgttccatgtaacggtgctctgcttccattcgtctttcacatggtacgcgccgatatacatattgtcgtaaaagtcgtcgaagtacagatgcaggttcagatatgcgctgacgatgatatcccctttattgagcgtgggcagcttgttcatcttcaaaaacgagcggtaatttccctgcccgaaggttccggcgtataccgtgccggtatagccgctctcgctgccgtagccgtaggccgtcgatggatgcgcgctgtcgatatatgagcaggctgtgttctgccagctctggctcgtcgtaaatgacgggtcaactgtgacggggtactcccgtttcgcgtcgttcagccatgcgtcatccgcggagagaacaaccgtcagcttatggtttttctgctctttaatctccatctggagctgcgtgctcttttcgcccttgctgtccgtcatgaacggcgcgtagatttcatagacggcttcgccatccttgtttttaagaacgatggtaaagtcgtttttcttttctgccgtcaagccatttatcttatatgcaatctcaaattcagtttgcgcgtccttatttttgagaatcatattctctttgataccggccggcgtgacaaaatactgcaagtccacgttcgggaaagcgtccttgtacaacgcctcctgcactaaattcttgcgcgcgaggaacttgtcgttgccggtaagctgctcgttgttttcgatgaatttaacctggcttttgctgacgccggggaagccccagctcacctgatacccgtcgcccttgattttgaccatattgcccttcttggccttttttgcaaggcggatatcaaggtcgctctttttgttttcatactctacgttttcttccgcgtccagggaagcgggctcggcagcgtccgtctcagcttctgtctcccctattgacgctgcttccgtttcatcttgtgaagccgcttcattttgcgttacgacggaatcattggtttcagccggtgttgtcccggatgctgtaacagactctgtttgagctgctgttgtctctacggagtccgtcccggcttcggtttcggttacactttcaaccggtacttccttcatggtgttgtcgtagtccacccattctccatctttgttctggaaatggacggggtactcgtactgcaccgccatgaagcttccgtcatccatgcggaaatgcttggtgtattggtcgcggtcttcttccacctcggctaaaatttccgccggcttcgtctcttcttcctcagcgctggtttcattgtctccctgtgtgccaaatgcttgattttctgccgcagaaagcgcaggcggaacaatagctcccgcctgtacggggattagggcggccatcagtgccgcaagcaccatagccgtcactagccgcaatttcttaaattgtcctgtcatgttctccatcctttctctttcatcaaaaaacatcgtaccctttaggaaatatttggaatattcccttaatcatattatggttcaaacacttacaattgtcaatcgattgtttagaaaaacgacggaaattattagatatattttaacacttcagtgtgtgtagtctacaaatttcagcaaggaataacttattagatactttttcttacgatacttgttttatcatctgcgttttttcgtataaacaataaagctaagggcagaggaatgaatcctctgccctatttatagcagttgctcttaagtggagatttgttatccgtaatacagtattaacaaaacataattaaactacgggcgtacccgtgcgtgaattatgttcctctttcgcgatatatttctgtatacagaggacatccattgtatttaccactccgtcggcgtttacatctgctcttttaagttgctcgtcatttaagttgaccatgagtgaaaagtagtgttgtaatagaaatatgtcgctaacgttaatgatcccgtcgccatcaacgtccccataacacagggtaatcttttcccattgggcgtgtgcggtaataaccgctttatcttctgaagttattctgccgattgcctgtccctccctaaataagctcttttgggaatcaagcggctcctgaccctcctcaagccagccaccgggggtataatgccactttgagcctatttgaagattccatcctttgaacaaatagccgtctctggtaaatgtgtttggtcgtaaatttcccgtaccataggtttcatgtgtatccgccatacttccggttccgccgttcgggtcgtatttgacggtataggtgtgtttgcgccattgtgcatacattgtaaccacgtcattatggacgttcgtacttttcgataccaggtttttgttagcaaacaatgccttatagtatccgctgggctgagaaccctctgcataccagccctgaacgccggttgagtttgtatagtaccacatgttatctgactggcggtgagcgtaccagccgataaaggtcgatccgatatttgtaaaggctaggtctcgcaaaggggtttttgttccccaaatgacagttgtgtccgccatactgccggttccgccgttcgggtcgtatttgacggtatacgtgtctttttcccactgggcatacactgtataactttctccgtagtcatggtaattttcaaataaagtggattggtccgcgacaactacttttacagcgtcgctgggtttatctgcttcggtgtaccataaattacgaccatttggacgtaaataataccacttagagtccgactgacgataaatactccagcctgtaaagtggtagcctggcctctcaaatttatttttgctgagcgggattccttcgccgccgggtgaatatgacgaagacatggtgccggtcccgccgttggcgttataaatgacggtattgttcatatagtcctcgaacatgatatatgcggcaagtttatgattttttactatgttatatgaaatatatccgtatccgccgatgccccagtcggttccccaagagttgataaatttaaaggaacccttttgatcgtcatagccgattaaacagactgtgtgatacccacgcgacgttccatatacctcatcaaaggtagaattctcgggagatatcttatcaaagtccgggtatattggaacagcgtccaatataacggcaatccctttggaaagcaaaaacttcatattattcacatttccgcctgtgattttacttattttagcagccttgaaatttgccgccttagcatattgctgcgcgttcggttgggtaaggtaatcattttgattatacggcatgtcagccagggagcatactccacgcgtaattatgttattgattgcgtcggaggtaaaagcgccttcgtcctttcccttattggttaaactgtatatgaaggcagggctgaactgatgacttgcagtattcggcccccagttacgcctgacctgttcctgatatgttttggccgcatatgctgtggcccatgcggtacagcaattttgctgaccctggtccccgggcgtaggaaactttgaagttaaatccactaaagtcggaagtgcgttttttgaatcagctctggtaaacgtaggtattttatccaactgctcctgagtcggcgggatacaacccatgccgtgtagttccgcgactccctctgcaggggcgagagccgcagccgctgttacctggaataatataaccaggcttaacagggcaaccacgatgtttttccatttcttatttttcattacagtactctcctcttcttattttgaaaacaaccccagtgctcgtagaagctttctctatatcgcctcctttaattataatcaaggtaacatagatactataaaattacataatatggtaaagaaatttcactatttgataaattttatttattctacactttagaaaaaattttatattacccagaatacgaagttccaaataaaacaaggtacaccggaaagagtcaaggctagcagccagaactccgttatcacacgacgagaaggcaatatttaaaagcgtcatttgaaatggagggtggtatcaaggtacaagtctccattgggtgtggtgaagtctttgaatatgtgcaaaacgattacggtgattatgagatatcaatcggctcttctataaatctgtttgtactataagaaatatttctactcttattgcgtcccattataccaaaccaacagcatataaaaccagctgtaaaatcagataatatattaatagaaacattacagcaaacaataaggaggctatcgttttagcaataatattcactcgtctgttcttctgtatttgcccttttactctttgcggtaaaatgctatttccgatttttataaaaagctcaattaacgcgtttaataaaccgtccataagtttttaaacctttccattaccctgtatctttgtatttagaataatacctccatatctgtttgtaaagtgagtgtttctcactccagctcctcccaaaaatgcagtaaaaggccgcagcttattccgctgcggccttttaaaatatttattttattttgccgatgtcccggcggtaaaacgcaccttcaaacgtaatccttttgaccgcgctataggctttgtcaagcgcgccttcaagagaaggagccgcagcggtaacgcccaatacccttccgccgttcgtataaaaatccccatcttcatatacggtgccggcatggtatacggttgcgccttccacctgtccgtcgtcattaacgccttcaatccgcaggccctttttatagctgcccggatagccgccgcttgccataacgacgcaggcgcatgcatcttccgaccactcaattaaaagctcggagagcttttcatcgatgaccgcatcgcatatatcgagcaaatctgttttaaggcgcggcagcacaacctgtgcttccgggtcgccgaaacgcgcattatactcgatgaccttcggtccgtccggcgtgagcatcagcccaaaataaaggcagcccttaaacgggcagccttcctgccgcatggcggcaatggttggctcaaaaattgttttttggcaaagctgcgccatttcatccgtatagtatgggttggggcttatcgtacccataccgcccgtattgagcccctggtcgccgtcaagcgcacgcttatggtctttggacgaaaccatcggctttacacattttccgtccgtaaaggccagcacggaaacctcgggccctgtcaggaattcttcaatcacgacccggttgcccgaagcaccgaactttttgtcttccatgatggcgcgcaccgtctcgcgtgcttcttcgagcgtctgcgcaataataacgcccttaccgagcgccagcccgtccgccttgacaacgacgggcgttttgccccgctcgtcaatatacgcgattgcctcatcaggggaatcgaacacctcgtatcccgcggtagggatgctgtatttcttcatcaggtttttggaaaataccttactcgcttcgatctgcgccgctttcgcgttcggcccgaatgcacggatgcccgcctgctcaaatgcatcgaccataccagcggcgagcgggtcgtcgggcgcaacaaacgcaagcccgattttgttttccttagcgaacgcaaccattttctctttatccattacattgatatcgatacactgcgcgtcgcgtgaaatgccgccgttgcccggcgcgcaataaagcttgcctaaccgtttgctttcgttgattttgcggatgagcgcatgctcgcggccgccgccgccaatcatcagaacgtccatatccagaatctccctgctgtatattatcagtggtggaacaggcggatgcccgtaaagcacatcgttatgccgtatttgtcgcacgtatcgattacgttgtcgtcacggatggaaccgcccggctgggcgataaattccacgccggagcgctttgcacgctcgatattgtcaccaaacgggaagaacgcatcgcttccaagggatacgccgctcaaattctggagccactgctttttctcttccctcgtgagcggctcgggcttgaccttgaagaactgctcccatacgccgtccttaagtacatccatataatcgtcggaaatatagacgtctatggtattgtcacggtcggggcggcggatattttctgtaaactgcaagttaagaaccttcgggtgctggcgcaaaaaccagatatcagctttgtttccggcaaggcgcgtacagtggattctcgactgctgccccgctccgactccgattgcctgtccgtccttcgcgtagcatacggagttcgattgtgtatatttaagcgtaataagcgctaaaataaggtcgcgctttgcgtcttcggtcagtgttttattccttgtcgggatgtcctgcatcagcatggcctcatcgattttcagctcgttgcgcccttgctcgaacgtgacgccaaatacatccttatattccttttcggcgggtttatagccttcgtcgatttttacgatgttatagttgcccttacgctttgatttgagtacctcgagtgcctcgtccgtatagccgggcgcgataatgccgtcggaaacctcgcgctggataagccttgccgtctgcacgtcgcagatatctgaaagcgctatccaatcgccgtaggaggacatcctgtcggcgccgcgcgcctttgcgtacgcgcttgcaagcggggaaagctccaaatcatcgacaaagtaaatctttttgagcgtatcggaaagctctgttgcgaccgctgcgcccgccgggcttacgtgcttgaaggacgccgcagccggaaggccggtcgccgccttcagttcgcgcacgagctgccaggagttgaacgcgtcgagaaaattaatatagcccggcttcccgtttaacacggtaatcggcaggtccgaaccgtctcgcgtaaaaatcctcgacggcttctggtttgggttacagccgtattttaactctagctcattcatgttatgatgcctccgtatcaaaaactcttatttgtttttattgatgattctgctttcaaaagcgcccgattgtacatcgatatagcggacaaaaagcgaaaccttattgtccgcattgagcgcgtcccaaagagcggctgcaaacgtatctatgtcttcgtccccaagcccaacgcgcttcggttcgccctcaaagctcggaagcgggctgccgtcgcacctgtaagtatggataaagcggccctcgcctgcaagcggcgtattgtacgagaaggtgtaccgttcgcaggattcgggatttccgccagcgctctttaaaatggaaatggcataattgaaatcaccgtccgagcattttaccacgccggaaattctgggcgtgtagttcggcgcgtccggctcaaaggtacgggtgcggagcgcctgctcaaacgtctgctgctggttcatcaggctgtagaccgtatcggtctggtcgccgtttgtgacaatcgttttattgccaagcacgcgtaccggcgcataaataatcagcgacgggtccaagagcttgctatcatcgaacgcctgtgtgcggattccctgcccatcctcgacaaatatacggttacggctgttttcgctgcgtcccataataaaataagcaaccaccgcttttttgccgtccgcgctcttaccaatcaggatgccgcggcccgggtaggcgttttggcgcaaatcctcatacaatgatatcatttccattaaaaagccccctatgattttattgcgaaataacggtttttccgccaacgacttgaattttatcttcacagaaaagagatacggcttccgggaggatttcccactcggcctctgtcatgacgcgcttctgtaaaagctccggcgtgtcgccgtcttttaccgcaaccgccttttgcaggataatcggcccgccgtcgcaaatgccgtttacaaaatgtgccgttgcgcccgtaagcttaaccccgcgcaaaagcgcctgctcatgcacatgcaggccataaaagccctctccgcagaacgcgggaatcagggatgggtggatattgataatcctgttttcaaaggctttgattacctgcgggcctaaaatcgtcaggaaacccgcaagcactacgacgtccgcctttacctcacggagcatttctgtcaaagccctgtcatattcttcaaatactttgtaatccttttttcggatgacgcgcgtatcgattccattttgctgcgcgcgcgtaagcgcataagcgtccggcctgcttgagaccacgcaggaaatccggccgtttttaatcgttccgttcttctgcgcatcgattagcgcctgcaggtttgtcccgccaccggaaacaagtacggcgatgtttttcacaatacgcgcctccccttacgcaatgattacgccttcgccgccatttacaacctctccgattacgcaggccttttcccccgcctggctgaggatttcgattgccttgcctgcgtcttcctttgcgactgccgcaatcatcccgactcccatattgaaggtattgaacatatcacgctgcggaatgttgcccaccttctggatgacgtcgaaaatcggaaggacgggaacagacgatttttcaatcctggctgtaagcccttccttaagcattcgcgggatattttcgtaaaaaccgccgcctgtgatatgggataccgccttgacgttcacctgcctgataagctccagcatcggcttgacgtaaatcctcgtcggggtaagaagcgtttctccgagcggcttatcaagctgtggataggtatcgagcactgttttttcatcaatgccgaacacctttcttacgagggaaaagccgttggaatgaacgcccgaggacgcaaggccaatcaatacgtcgccggctttaagcgcgccgccgtctaccatcttatttttatccacaatcccgaccgtaaagcccgcaaggtcgtattcgtcctccggcatcataccggggtgctccgccgtttcccctccgacgagcgcacagccggactgcacgcagccctccgcaatgccggaaacgatttccgcgattttctccggtatattcctgcctgttgcgatatagtcaaggaaaaacagcggttttgcgccgcagcatataatatcgttgacacacattgcaacgcagtcgacgccgatggtatcgtgacggccaagtaaaaatgcaagctttaattttgtgcctactccgtccgttccggaaacgaggatgggctcctccatcccggccaaatccggcgcgaacatccctccgaaacctccgataccggaaaccacgccgtctgttttcgtccttgctacatgcttcttcatcagttcgaccgatttataacccgccgtaacgtctacgcccgcctctttatagctttcactgaagctcttcatatcagtgtaccgcctttccttcaaacaaattatcagaccgtttcaatttttctcgcgaacttatcctcataaacggctgtgggaacctcagccggataattcccggtaaagcacgcgtcgcaaaagccgacgtttgcttcctttgcaatctccctaaggtgcgtaaggcttaaatacccaagagaatccgcaccaattttttcccggatttcctccgccgtcattttgcggccgattaagtcgtcctcgtttttaatatccgtgccgtagtagcactggtttaagaagggaggcgacgaaatgcgcatgtgaacctcttttgcgcccgcttccctcaaaagccttacaatatgcgcgcaggtcgtccccttgacgatggaatcgtcaatgattacgatgcgcttgccttcgaccgctgccttgagcacgttgattttgattttgaccagctgctctttaaacgcgttcctgtggccggcaaacgtcctgccgatatatttgtttttgataagcgccatcccgtaagggattccggaacgctccgcatagccgagcgccgcactgacgccgctgtccggcacgccgcagaccaggtctgcttccaccggatactcctccgctaaaaaggcgcccgcgcgctttctggcattatggaccgaaacgccgtcaatgacgctgtcgggccttgcgatatagacgtattcaaacatacagacagacgacttgcccgtgcaattttccttatagctgtgcaggccgtcctcgtcgataaccacaacctcgccggggagcacatcgcgtataaactgggcgcccaggctttcgaacgcgcaggattctgatgaaagcacataactttcaccgattttcccaatgcaaagcgggcggaaaccgttcgggtcacgcacgccgatgagcttgctcggcgacgagagcaccatggagaaagcgcctttcagctgtttgacggcacttagtaccgcgtcttcaatagaagcggtcacgacgcgctggcttgcgaccacgtaggcaatcagctccgcgttgctgttggactggaaaatcgcgccgccctgctcaagcgtttcgtgcagctcggaaaggtttgtaatcgccccattgtgcgcaatcgcaagcgaacccttgatatagcgcatgaccagcggctgcgccgccgcgcgcacgatggcgtcgcttgcgcagtagcatacatgcccaatagcgattttaccattgccgagcgagcgaaccgccttttccggcagcgcctccggcacgattcccaaatccttggcgcagcaaaactcaccgccgtcgttgacggcgattcccgcgctctcctgccccctatgctgcaatgtatagagcgctttataggtttcttccgttacgttgagctcctcgtcgtttttatagatgccgaaaacgccgcattcttcctgcgggctttcgttaaacggcatatcgaaattttccgcctttatcacagctcattcaccttatcctggacagtcttgtccttctttataacgcccgctttcatatcctcttttgcctgtgcaagccttgaggcaagctcgccatttgaaaccgcaagcatctgtacagcaaggagcgccgcgtttacagcgccgtcgatggcgaccgtcgccacagggattccctgcggcatctggacggtggcgagcagggcgtcgaggccgtcaagcgtggaggatttgaccggaattccaatcaccggaagcgtcgtatgcgccgcgagcacacccgcgagatgcgccgccttgcctgccgcggcgataatcacgccaaagccgttttccctcgcgtttgccgaaaattcagctgcgcgctccggtgtcctgtgcgccgacattacgtgtacctcgaccggcacgccatattcctttaaggttttaattgcacccgacacgaccggaaagtcgctgtcgctgcccatgataaccgctgcctttttgatttctgccattttttgaacgcttcctttctaatgatgcgcggacttgttccgcacaaaaaataacggggccgcggccatagggccgcagtcccgtaaattttacaaaataccgattgtacgcaggtgtcccatggtaccggattttacagcgtatgaacattcaatatccagcaaagacatatcagaagacctccactacaaaacgatacccttattttatttcatttttacatgaaattcaatagcccgcggctgcggatggcttattttgtattaatatggaaggaaagctgattttaacaccatattttgtatattctgctcattactgcttgacgggcttatcgtccacgacaagctccttaagcgttgtggcaaggcccgcgagcgactgcagctcagacgggatgataatcttcgtcgccctgccgtcggcagccttttcaaacgcctcaaagctcttgagcgcgatgaccttatcggacggcgccgcttcattgagcattttcagggaatctgcaaacgccttctggacggaaaggatagcctccgcctcaccgagcgcctccctgattttcgattccttgacagcgtccgcctggaggatagccgcttccttatggccttccgccacgaggatttcgctgcgtttttcgccctccgcctcaagaatcttcgcgcggcgctcacgctccgccttcatctgcttctccatagcctcctggatttcacgcggaggcaggatatttttaagttcaacgcgcttgaccttgatgccccatgcatcggtcgcttcgtcaaggataatcctgattttttcgttgattgcgtcacgcgaggtcagcgtatggtcgagctccaaatcgccgatgatattacgcagggtggtcgccgttaaattttcgattgcgaaaatcggcttttccacaccgtaggtatagagcttcgggtcggtaatctggaaatagacgaccgtatcgatttgcatagtaacattatccttggtaataacgggctgcggcggaaagtcgacaacctgctccttgagcgtgacctttttcgcaatccggtcgataaacggaattttcaagtgaagcccctgtccccaggtgcccttgtagccgccgagccgctcgatgacatacgcgttcgactgggatacgactttgatattcgcaacgatgacccagataaccagaatcacaattgccgcgatgacaacaagagaaattggatccataatttacccctcatttcctgataaatcttttatttggcagccgctgttttctgcggcacaaccatcattttaacaccctcgacagcctggattatgactggctcgcccgacgggataacagagccgtcgattgtccgcgccatccaaatggtgtcgccgattttaatttcgcccgtgcccttgtcgttgttgatttccgtcaggacccggacggtcttgccgatattcatgtctacattcgtgtactccgccttgttacgctgcttgaagcgcttgacaagcggcctggtggctatgagcgccgcgagtgaaatcacgacaaaaactgcaagctggattacaatattgtcggtaaaaacacaggtgaccgccgcgccgatggcaccgaacataaaccagatggatacgagctgtgccgtcgtggcttccagtattcccatcagcaaagcgatgccaagccatataaaaggcatatactgctccatggtgtttcccccttatctttggttaaaataacagtatcatacaaaaatatcaatgtcaatcttttgcagattacaaatcatgacaaaaacataacggtttctttaccagcggcgtgattgttatgagacaaaattcgacaggacgtttcaaaagaatccctatacacgatttttgatttatggtataataaaatcaataaaacaagaaaaaaggtgggttggaaatggattttgatgcattatcggaaggaattgctcccggcggtttacgaaacaaggacgacatccggctgttaatatgttatgtactccacactgtggataaacccatgagcgtcgaaagcctgacaggtattttgcaggaaacggaactggcaaattattttgaagcggtcgacgcctgccatgccttgctcaaaagcggcaatattgccccaaccgaagaggacgaaacgctttataccgtgacctccagcggacgattggtttcctcccagcttgaggatgagcttccgcccgcagtgcgcgacaaggcggtcggcgccgcgctgatgcttttaaacaggctgcgcgcggaaaaagaaaatgcagtccacatcaaaaagcttgaaaacggctatcgtgtgaactgcagtatttccggcggcgatacggagcttttttcgtgcagcctatatgtgccggaggaatcgcaggccagaatcgtcaagcggaacttccgcaggaatcccgaccaggtctataatgtgatgattgccgccctgacgcgaaaccgcgaccttgcgaaaacggcgcttgaagaaattgaaagcgcgaaaaaataatcagaaaaacatgttgagcagcagcataagcgttacgcccgggattcctcccgcagccgccacagacaggctcaaggtactgactggtagtgtaacgcccgtaaaaaagcccgctagatttaccgcaaggagggatacgacgcccagcgccatattcccgaccgccttgcgtattggtttttttgttccggttgcaatttgaattacaagaaaaataacgaacgtcccgcctagaattgcccatatcagccattgaggcataaaatcagctcccgcatacttggtttgtgtttgtccttaacaccattgtatgcgggagcttttccgttcagaagcaacaggatatttttcttacatggcttttgccagggttttctgcattgcaagcgcgtcgtttaaatcgagccttccgtcgtcgttaaaatcagccgcgaaataaacaagcgtgtagggttctcccggcgcttcgattatttttgctatatacttctgcagcgcgagcacgtcgtttaaggaaagcttactgtcattgtcccaatcgccggtaattttaacccggtcgggaaacgcctctttcacgtcggccatgtcgattgctccggcaagggcagcctcttccaggccgtaaacggtatcatcggtgagagatacggcagatataaaggtaggatcgggattcccccagctctccggcgctgctgtgtatccgccaatttggacgtgatagtatgccggctgtgtcaaaaaccaattgtggcttgcatagcacagggcaaagtctccggaatatccgcaaaccttaaaacggtcgactggcccatactgcgggtctgtcacataaggcgtatagccgtaatgcgcgcagaacttaaggtaaagcgcgtccgcctgttcatccggagtttcgcaggcacccgccggcgcggccagcacgaccgccgcaagcatgaaagcaagtgccaatgaaattactttttttatttccaccactcctttttcgtctgtattctctatgactttggtaaaacctacgtgactttcctactataaacaccgccgcagcttccaattggtgacatgtattttacttcaaatttgccaccccttggacagccaaattgccggactctcaaacggtatcgaaagtctatggccgctattggcagcctgccgttaccagtcatttcagccttttatttttgggcctctttaccggcaagcttctcaccatatttcaggtactccttcatcggaagcgcggggctgtacaggtacccctggaagaggcggcagcccagcttcataagttctgcgcgcagctgttcgttctccacaaattccgccaccacctcaaagcccatggtttgccccagctttacgatagaggctacaatatcacggctgcgcgggttatccggaacctgccggaccagcgcgccatccagcttcacgtactgaaagcctccgttctgcaggtacttgagggaggtatgccccatactgaaatcatcaatagccgccttcaggccattttccgcaagcagcgccagattttccgtaatgttgtcaaaccgttcgagaggcgtattttccgtaatctcaagacatatgttttccgacacgccgcgctttcccgcaaaggaaaccgcctgtttcacaaagtcgcggtcattgagctgcgccgcatcaatgttgacagacaccaccagcggcctgtccagcgtttcgcacagtatggctatgtccgccgcggcggtgttcagcacttgccaagtaagcgcgtcaaacaagccgctctcctttgcgagcgcgattgccaagggcggatagaccggctgctccgagtaggtccagcgcagcagcgcctccgccccgaccagccgccccttgtcgtccacctgaggctgatagtataccggcagattatcatgcaggatgtcgctttcgagctgtgcgctcaaggtcttcgcagcaaagcccaaatcgtcgctgcggtcgagcagcggcctaaacaccccggtatcttcctgttcatggaacgccgcagtcaaacgggtagtcagcatggattcccgctggcgctgggtgcgctccagcaggcggataaagggcgcgtataccgccacgccggcgaccaggattacgagctgcactaccgcgccattgatgcttcccgtggcggcgtaaccgctgaacagcacaggcgtggtccatgtcaccgtttcggtcaccacgggaatgaaaccgataagcgtggctccataagcaatcagcagcgacaccaccggcaccagcaggaacgggacaatcatgataggattgaggataataggcagcccaaacaccaggatttcattcatgttgaagacggcaaagggtgccgcggaccgcgcaagctgccggttgttccttgtccttgagaacagcagcagcgcgccaagaaggcacagcgtagcaccgcagcctcccatcaacgcgaagttgtctaaaaagcttttgcacacgatgtgcgtcgggtcagcgttggcaggtacaagaaacgcgagggcaacctgctccatcatattaccgccgtggataccgaacagccacagcaggttaagaataacagtgaataggataccgctgacaagctcgttatcgatactttcaaacagcgaaagcaatccgccggaaaccaaatcgtttacattgtccacctgaagtccgtggcgcaggcccatgttgataagcacaaacaccagcagggtcagcaaaaagggaacaatcatggaaaacgctgcgcgaaaacggtagtccgccccggcggcataagaccgaaaacggcgcggcagcacgcggtacagcagccggaacagcgccggagcgcacaccgcacacaggatggcggaaaatatgcccaccgcgctgaaatatgtaatgtcgatggcgccgtccgagcccacaaaagaagccacaaagcagctcagggccaacagcaccgacaggagctggaaggaggtgtttcccgggcgcagcacaccggaaaagtagtagctgacgccacccaccaggtatacagacagcagcccgaaggtagccccatacacaaggttgcatagctccagcagcaggccgcccacaccgccctgcagcaaaaaatcctgaaagcctggcagcgggaagctgcgaatcatcagcgcaaccgagccgataaccagtaccggaatcagcatcagcatgccccgcttgacagaggagaacaccgcgttcccttcaatcatatcaatcagacgcagcaagctggcgcgtccggcgtttttattcgtatcctccacttagcccgtctccctctggcagatattgtcattactgattttagcatatatttattaaaatagaaagccgccgactccaacaaactattggataatcctgtcaattaaaagccttacggacacggcaaaacaaaacgcaccccgccaagtgaggtgcgtgatttgtgcaggcacggccctgcttattagcgctgataaaaaatccgcatcagctcagaacatacagctctttgaaattttaaattcttaatatagtatatcaatttttaattttcaagtcaatataaataaagttgaagctatcatgcaaaaagcgcatcccaagggacgcgcttttcataataatcaaattttttatttgaccataccggcaacttcttctgcgaagttgtcctggcgcttttcaaggccttcgcctttttcaaagcggacaaatccggtaatggcaatggaaccgccaagctcttttgcggtgttttcggtatacttctgaacgctcaggtcaggctccttgacaaacgcctggtcaacaaggcaattctctttgtagtattttccgattttgcccatgacaattttctcagcaatttgcgcaggcttgccctcgttcaagacctgctcggtcataaccttcttttcatgctcgataacgtcggccggcacgctctctttattgaggtacggcggcattgcggccgcgacctgcattgcgatgtcctttgcataggcggcaaagccttccttatcagctacgtctgtatcgaacttaaccataacgcctattctgccggcagcatggatgtaagtgacgaccgtaccctcataacgctcaaaacggcggattttaatgttctcgccaatcgtgaggactttatcctgaagaagctcggcgaccgtcttgtcgctgccggaagccttgcatgcgagcagcgcgtcgacatcggcggggttctgctcaatgacagtcatcgcgcaggtcttgacaaattcctggaaatccgcgttctttgcgacaaagtcggtttcagcgttgacctcgataacgacgcctacagtgccgtcgtcattcgtgcatgcaaacgcaacgccctccgcagcaatcctgccgctcttcttcgcctgctttgcaagcccctgctctctcaggaaatcaacagcagcgtccatatctccattggcctcggtaagcgcctttttgcagtccatcataccgcagcctgttttctctcttaaagctttaacgtcctgtgctgtaaaagccattgtaaacatcctttcctatatataaaataatttattttctgttcatatatatgattcgggcaggcacgagtacccgcccgaacaagccgcgtttatctttatgcctgggctggtgcctcttcctcagccttttcttcctcttccctggctgcggcgcccatctggccttcgtgtccttcgatgacggcgttcgccatggtagcggcaatcagcttgacggcacggattgcgtcgtcattgcccgggattacatagtcgatttcgtccgggtcacagttggtatcgacaatagcgacgattggaatgccgagcttctttgcttccgcaacggcgattctttccttgcggggatcgacgatgaagagcgcaccgggcatctgcttcatttccttaatgccgccgaggaatttttcgagcttctcgatttcgaggttcagcttgatgacctcttttttcgggagcagttcaaaggttccgtcggtttccatcgtacgcagctgctttaagcgttcgattcttcttttaatggttgtaaagtttgtgagcatgccgccgagccagcgcgcattgacataatatgcgcccgcacgttcggcttcctccttcacggagtcctgcgcctgcttttttgtgccgacgaacagaaggctctttccttccatggaaaggtcgcggacgaaggaatatgcttcctccagctttttgaccgtcttctgcaggtcgataatgtagattccgttgcgctcggtgaagatgtattccgccattttagggttccatcttcttgtctggtggccgaaatgtacgcctgcctccaaaagttgtttcatagatacgactgccattgttgtgtcctccttaggtttttttcctccgccaggcccagaccggaacaaccgtttttaaaaacggcacccttccggcgcggcaccggcgtgcgtaatgcctgaatattatagcacagcgcttttttaaatgcaagtctttttttctggtattttgcgattgcaatgcggttttctgccatgcggtaatctgcgcgtggacaggggcgctgtacctgttcgcggcaacgcggctgaatttcatgaaaaaaggcgtattaggctttaaaaagcacggaaatttgcattatcgtgttgctgtccggctgcaagacaatgaaaagccactgttgtttcaggaaaacagcataggccaaagtaagggcgtcaaaaataaacataacacaataaaagccggcacagcctgttttgccatgccggcttccgaatgtttttaccgtatttaacgcggcgcttccctatgttttatagcttgcaggatgctgtcagcgggtaaagccgacaaacgggtttttgaatttccgctttttcttatccttgcagcagtggttgacgaggatggtatcttccccaatcaactcgatttcgtcccagcagattacgatatcgtcgcaccggccgaacagcccgagcagctttaagcgcccatagatgatgatagccacgagcttggccgtgcaggtgtccacctctacgtcatcgacaaagcccaggcgcattccgtcctttgcgttaatcacttctttatggcgcatgtcaacaatacggcaattcatataacgaccaccctttccgtaagacaaatgaataagaccatcgcttcttatcagtatattctgaattttgtgattgtatcacctgtgaaattatggtacaattacagcaattcatatttggaggttgtcaatgaaccagtatgctatcgtatccgacggcacgctcgatttaaacgcgcagtgctgcagggatttggacattcacgtaatcccgatggaattcacgctcgagggaacgccttataagcactatgcggacgcaagggagctgtcgtaccaggacttttacgacgcaatgcgccagggcaagttctccacaacgagccaaatcaactacaaaacgtttacaagctttttcaaaccgttccttgaacagggacaagatattttatatatctgctttacctccggcatgagcggtacctacaacacctgccagattgccgtagcggatttacgggaaaaatacccgcagcgtaaaattacggtggtggattccctgtgcgcatccgtaggcgaagggctccttgtatacaatgcggcattaaaacgccgcgaaggcatggagcttgacgaccttgcgaaatgggtggaaaacaacaagctgaacgtctgccattggtttgtcgtagacgatttggagcatctgaagcgcggcgggagaatcggcgcggttgccgcgacgttcggcaaagcgtttcagattaagccgcttttgagcgtggacaatgaaggcaagcttacgacaattgcaaaaatcaggggttcaaacaaagcgcttgaaacgcttgccaaccggctggtttcagacggtgaaaacacgaaggaacaggatattatcattggacacgccgactgcctggaggacgcgcagaggcttgcggccatgataaatgagcaggagcttgtaaaaaatattattatctgcgatattgggccggtcatcggaacgcatgtcggcgcggggatgctcgcgcttgtctttatgggtcgcaggaactttgataaagaataattttcacattctttacgaaatcatatcctttatggtaaaataaaacctatggaaataaatctcatgcaggagttgggtaaaatgaagaagttagcagcgctgttcctgtctgtcttgctgttcgtgggcgtgcttgcaggatgctcagacaaaggcaatatgacgatagaccaggcaaaggccgcaaacccggattatgttggaagtacctcgaacggtgaatatgaatatgacgtctacaagacgcatatcgagctgacaaaatatatcggcaaaaacgccgacgtcgtcatcccggaaaaaatagacgatgccaaggtaacgaaaatcctatcaaaagcctttaccgatacaaaggaaaagacggtcaaaaaaatcacgattcccgcgacgattacagacatcgacacgcacgctttttattgtgtgatgggacttgaagaaatctccgcagacagcaaaaacacggcatttgtttcagaagacggcattctttattccaaggacaaaaaggatattatcgcttatccgattgagcgcagcgcggaaacctatgaaattcccagcactgtaaccgttttgcagaacagccgatttgccttctgttcaaagctcaagagtattaaaatccccgacagcgtaacgaaaatcggtgattatgtgttccagagctgtaccgggctcacggaaatgacgattcctgacagcgtaacgcagatgggttcctctgtcttcctgggctgcacgaaccttaaaacgctgacgctcccgaaaaaccttgaaacaggcgatcagacgatggtttggaactgcccttccctacagattatcaagggatataccggatcgcccgcgcaggaaattgcaaaaaacaccgaaggggttaagtttgtaagccttggcgtatacgaaaaacccacagaagctgaaacgcagcccgtaaccgacgcatccagcaacgacgcggataacccgtaccaggacccgatggaataatttttagaaaaattttcgataaacacacacattaaaaaacgctgaggcacaaagccccggcgttttttgcttgcaataaactttttgacatgttgctttcctgaattttcatcagctttttcgaagcattcttcttggatttttcatgatactttctatttttaatcaaaagaagagaaaccgtttcggcggttccctccttctttttttgcaacgtgccatttcatggctttttatttgaaacatgccgtttcttgggttttttcataaaactttctatgttcaatcaaaagggaaaaacaattctctgtttttcccttttgcaaacccttttcatcgacagggaaaacctcgtcgcaggttttcccttgaccctttccagccgagcaaggggctgcgccccttacaaaccccacacgatagaaaccatgccgttcctcgtttaatgtacggggcgtagaacagatactgcgggacgtttcagcgccgcgcctgcgcgcggagttctacgtgacggcggtacttattaaagctaaaaaagcgctatttccatttttgggtgagcgtttttcaagttttgaactttttgtgccacaaccagatataattctaatgtgtggaacagaaagcgaggtgttttgatgaatccacgaaccggcagaccaaaatcagcaaatcccaaatcatatgaggtgaaagcgcgtattgaccagagtacaaacaatcttctggaacagtactgcaaagaaaaccatctcactaaaacggatgtagtccgcgcgggacttgagctggttttaagccacaaataaaagcggagaagcggttccccgacgaaaggataggccgctcccccaacacaccagccattgcagggcaatgacggcgtaaatattataccatgcgcgcatctgcctttcaagcggcggtgaattttacaaacatgtattatagaacgtctcaccgcggttcaaaacattacataatacagaaccgactacaattaaacaagtatgataagtaccaatcccacctactccgctaactaagaaccatctcatggagtacttttcgggagtggtacttattttaaaccactttttgaatctaataaaatttttccattttttggtgagcttttttcaagttttcaacttctcgggttccattgctattataatttatttgtggattccggaaagtgaggtgatataatgtctccacgtaccggtcgtccaaagtcccataatcctttaaatgtcgatgtaaaagtccgactggatgagtcgacaaatcaaaagctacttgcctattgtaaagagcatgggataacaagggttcaggcaatccgaaatgggatttttaatttacttaaggacgacgaaaaataaaggaacgccgtgcacacctcgaaaaagataacacagcgtcccaacctcaccagccattgcagggcaatgacggcgtaaatattatagcatgcgcgcgtcttcctttcaagtggcggtgaattttataaacatgaaaggttgtacagattttatgaatatcatcgaagagctctattacggcaatatcaatccggttgaaaaggaattcaaacgcgattccagttacgcgaaattcatgaaaattttctcagaaaatgaacataagctttttgctttttttgaagagcacaaggaagaaaaggaattatttaccgcaatgtgcggcgtgcgcaatgccctgctcgattttggggaacgcgagcgctttatcgagggtttccggctcggcgcgcgttttttgctcgatatgctcattacggaacgtcccgccgcggttcaggacattacataatggcaagacccctgtttttaaaaaacgctgcaaaaggagaaaaaaatgaaagatgaagatttaaacgcgctgttcaagctgctggaacagcatatttgtccagaggcggggagcaaaaggaaacaggaagagcaaagggaagaaccgccatatcaaaatgaatatccctttacttttcatgacaggtttcttgaatacattggctttgctgccagcagcttttcaattttcctggaattcaatccatttgcgagtaagaaggaagcagattttcttttcagccagtttgttttatcgtgtattgcgcggtgtgccggagacacgcatgctggtgaaatcgccggcagcggatattgttatataacggacgcgctgaaatactgctgttcttcccctgatgcttgagccggacaaaaaattttcacaataacatagtaagagtattacgcacgccaaaaaagcactatccaacgtagaactccgcgcgcaggcgcggcgcacagcggtcccgtactatcattactacactctacacataaaacgaggaacggcatggtttctatcgtgtggggtttgtaaggggcgcagccccttgctcggctggaaagggtcaagggaaaacctgcgacgaggttttcccttgtcggcggaaaggtgattccaaaagagggaaaccgccgaaatggttttcctcttttgattgaacatagaaagttttatcaagaaatccaagaaacggcacgttttaaaacaggactcaaaattgtacaaaataaaaattggtttaaaaaaggcagccatatggctgcctttttgtttaatagccgtgtgcttccttgagcatcatatccttaaccttcatcaggcggatttgcgtgctgcgctcgttctcgtcaagcttcattgtgatgtacttgatgttttcctgtgtctgtggaatcatcacatgttcaagcgcgttaaccctgcggcgcgttttttcaatttcgcctgccatcagctcgcacgatttttcgacctccgcaaggcggagcatatcgggcagcaaatcagaaagcgatttgaccgcgtcgtctaaatcgctcgacgtgaacgcaaagccgtaggaataaatatcattctcgtcaggcgtgcgcgttttataatcgagcacggggatatcgacactcatgacgttgcgcgtgctgagctccagggaaacctcctgtttcggagcaagcaaagcggcgtttaacacctcgtcggacatagaagcgcgcgccaggacaaaattcttattcgcctgcgcaatgccgcgctctaccttttcacgcagttccttattttcccgaaccaaatcgaggaactgacgcatcagctcatcgcgcttatcctttaaaagcttgtggccgcgcatggcggtgacgagcttttttttcaggcgcgtaagctccattctggttgggttgactgtggttgacgccaaggccgttcacctcgctttttagtctttgccgtaatatttgtcaaggtattcgtccttgatacgcttgagctcgcttctgggcaggatagacagcagcttccagccgattttgagcgtttcttcaatgtcacggtttgtttcgtagccctgggagacatactgcttttcaaattcgtccgcaaactttgcatagagcttgtcgatgtccgtcagcgccgcttcgccaaggatggtcataagctcctttgcgtccttgcccctggcgtaggccgcgaagagctggttcatcgtgttggcatggtcggcgcgcgttttgccttcgccgatgcccttgtccttcaaacggctcaaagacggcagtacgtcgataggcggcgcaatattcttgcggtacaaatctcggctcaagataatctgcccttccgtaatatagccggtaaggtcgggaatcggatgggttttatcgtcttcgggcatggttaagattggaatcagggtaatactgccgtttttgcccttttgccttcccgcgcgttcgtagagggaagcaaggtccgtatacatatagccggggtatccccttcgtccgggaacctccttgcgcgcggcggaaacctcacgcagggcgtcggcatagtttgtgatatcggtcataatgacgagcacgtgcatgcccgcgtcgaacgcgaggtactcggcggcggtcagcgccatacgcggcgtggaaatacgctcgatggcggggtcgttcgcaaggtttacgaacatgaccgtgcggtcgattgcgcccgtttctttaaagctttcaataaagaagttcgattcctcgaacgtgatgcccatcgcggcaaacacaacggcgaacggctcgttcgtaccgcgcaccttcgcctggcgcgcaatctgcgcggcaaggtttgcgtgcggcaggccggaggctgagaaaatcggcagcttctgccccctgacgagcgtattcaggccgtcaatagcggaaacgcccgtttgaatgaattcctgcggatagttgcgcgccgccgggttcatcggcaggccgttaatatcgaggcgcttttccggcaggatgtcagggccgccgtcaatcggcttgcccatgccgtcgaatacgcggctgagcatgtcccggctgacgccaagctccatgctccttccgagaaaacgcaccttgctgtcggaaaggttgatgcccgcggagttttcaaacagctggacgagcgcgtccgagccgttgatttcgagcaccttgcagcggcgcttttcgccgcttgcaagctcaatttcacccaggtcgttgaagtggacgtcctcaacgtccttgacgagcataagcgggccggcgacttcttcaattgtacggtattcctttggcatcagaggtcgcctccttcatcgattgcttttcctatttcacggtcgagctggtcaagcagctcgccgaattccttcttcgtctggtcgcccgggatatatttaaaccgcccgagccgttcccttaccggaagcttaaccaggctgtcgaccgtcgcgcccttatcgagcgccgcggccgctttgtcgtaatacgcaagcaccaagagcatcatcatatgctgcttatcgagcggcgtataggtgtctacctcgtggaacgcgtcctgatggagaaaatcctcacggatagagcgcgcggcctccagcttcaggcggtctggcgcggaaagcgcgtccataccgacgagcttgacgatttcgtccagctccgcctcctcctggagcaggcgcatcaggctgtggcggcattccatccagtcgggtgcgactgtgtcgttaaaccactgcgccatggtatcgagatagagcgaatagctcttgagccagttgattgccgggaaatggcgcttgtaggcaaggtcggaatcgagtccccagaacaccttgacgatacgcagcgtcgcctgcgaaaccggctcggatatatcaccgcccggaggcgacacagcaccgataacggacaacgcgccctgttcatccttagaaccaagcgtaatgacgcggcccgccctttcatagaactgggcaaggcggctgccgaggtacgcggggtagccttcctcgccgggcatttcctcaagacggcctgacatttcgcgcaaagcctctgcccagcgggaggtggaatcagccatcagcgcgacggaaaagcccatgtcgcggaaatattccgcaatggtgatgcctgtataaatagacgcttcacgtgccgcaaccggcatatccgacgtgttcgcaatgagcacggtgcgctccatcagggaatagcccgttttcgggtcgataagctccgggaattcgtttagtacgtcggtcatttcgttgccgcgctccccgcagccgatatagacgacgatatccgcctccgaccattttgcaagctggtgctgcacgacggtctttccgcttccgaacggacccggaacagcggcgacgccgcccttcgctatggggaacagcgtatcgataacacgctggcctgtgacaagcggcatttcgggggacagctttcttttataggggcgtccaacacggaccggccatttctgcatgagcgtgatttctacgtcggtaccctgcggcgtggtgacgaccgcaacaggctcgtcgacagtatattcgccctctttaattgatttgagtatgccggaaacctttggcggcactaaaattttctgggtgacgacctttgtttcctcaacggttccaatcgcgtcacccgcggaaagcttgtcgccggctttagccgttgggacaaacctccatttcctgtcgcgcttgagcgacgggacctctacgcccctgtgcaggctgttgccgctcagcttcatgatgtcgtcaagcgggcgctggatgccgtcgtaaatactgccgataagcccggggccaagctccacgctcaacggcgctccggtcgattcaacaggctctccggggcctaagccggacgtttcctcatatacctgtatggaagcccggtcgccgtgcatctcgataatctcgccgatgaggcgctgtccgcttacacgcacaacgtcgaacatgttcgcgtcgcgcatcccctcagcgataacgagcggcccggctacctttttgatgattcctgtgctcattgtagcattcattcccttcgatgggttttcttctatattttaaaaatcaatcgttgaatataatatccgacccgacggctttttcgacaaattgcctgacggccgcaatccccatgccgttgtttcccgtgatgcccggaatcgggatgatggccggtacctgctgttcgcggtaacgcaaaagctccttgtcgtaatcctttaacagcgcttctgtaatataaatcacggcgtattcgccgttacagagcgttttgagctgttcagatgcgtcctgcccgtattcgaccggatagatatcgagtccgagcgccgcaaagccatagatgctgtcgcggtcgccgattactgcaatcctatacatacatatccctcagcctttccttgattgcttccgaatcgagcgcgtttaattttgctgaaagaatcaggcgcacggccttaatttcattgtcgcgcgcgatgatatacgccgcgagcggcccgatggaaaacggctcccatttctgcggtttgattttatcggtcagcaaatcgtcgcaccatttttcaaaggcggttggagacgttttcagcgcgtcaaccgcgcccgcgtaatcggtaaactgtaaataaccgtaaatatcctcaagcgattttgccgccgctgacgcgagcaggtttacgttgagcgacgagcaggaagcaaggctctttttgataaattccgccgtctttcctgttttgacgcagcgcaccgccgttttgatatcggcggaggcaaccgtcagctcgctgtaaagccggattacctcgttgtccgattcctgcccgagcctatgcaccgtttcaagcgacgccttgtcgagtatgacgtcgcaaagctgaccatcgcccgtctgcaaaagcgctgtgagcgcttcgccagccggtccgcgcagatactcgggaaggtccgtgtaatcccgttttgttacggcctcatataccgtctgggccggaactgtcccgttctctataaacatgcccgcggggtttgcgtcgcgtgtgactgccttgatggaaacctttaaattgtgaaaatcgtttgggataaggaacacgttaaaaacgctcatatcgtccacaagctcgcgcatgagcgaccatgtcttttcctgctcggcttttaaaagagcgggcgcggaaagcgtctttccttcctctccccagccgtggtcataaagcaggcgcatgcattcgtcatagtccctggcggacaaaagggcgttcaagtcgctcttagtaaggagcttcatttcctttgccctgatacgcgcgaccgcgtaggtgtattcttccgacataaggcggtaaagccccctttcttaaggaaacagcagcgtacgcacttcgtcctggagctgctcgtgcatatcggaaaacagtgcttcaaacgagcagttttcctctatgccgccgtacagcaggagaaaaccgccgtcgatgcgcgccggctgctgcgcgagcttcagcttgttttttgacgcaagcttcagctttgcctcaaagagcttcggcaggcgctttttgtccctttcgctgaaggcgatttcgccctcctcttcaagcgcgtgtttttcaaccatttggaggatacgctcaaaatacttgtcctcaggcaaattgagcagggtagtctttgcgtcgagcagtaccctggagattatgtcctgctttgccttgagcgcttccttccttttataaagctccgaagccgaccgcccccttgcaaggatatcgtcacacttctgctttgtatcaccgtcgatgcgctttacggcttcctcccccttctgccgcgcttgccgcgcgatttcggaggctttatcctgcgcttcctttataatcgatgcggaaacctcgtcggattccattttaatctcgtctaaaatcttatctaatccattcatatggcaatgctcccgtccaggttatttttcatgcgggattaaaagggcaggtttggaatattgaagattgcaagcatggaaacgagcagtgcgaggatggcgtatgtctcgaccatagcaggcagaagcagcgccttgccgaactggtcaggctttttggaaacggtgccgatactcgcgaccgagcatttgccctggtggatggcggaaaacaggcccgcaaacgcaatcggcaggcatgcagcaaagtagagaagcccttttgtaacagaaatgtttgggtcgccgccgaggatgcctgtattggcaaggacaaggaacgcgaccagcagcccgtaaatgccctgtgtagcgggcaaaagctggaggataagtaccttgccgtatttggacgggtcttccgtcagaacgcccgcagccgcgacgccggcttttcctacgccgatagctgagcccgtgccggccaaaaaggtggcaagcgccgccccgattaatgcaaaaacaattccaaagttatccatggttaattttcctccttgattttgtagtgcttggtgtttatctggaagggggtgaatttcactccgccgccctcatagaacttaccgaagaactcaacgaacgacaaacggttcgtatggacgtacgcgcccagggcgttgatgccgatgttgagcgtatggccgataatgaacacgacgatgaacggaatcacgccgacaccgccgccgaacatggaagcgatttgattgaacacctgcgcgataacgccggtcgcaagtcctaaggccagaagccttgaataggaaaggatatcgctcaaatagctggtcacgccgtaaaggccgtacgcgcccttgagcagccgtttgaccggtttggagccgcgcccctcaaagagcaggataatgaccgcgccgacagccgcgcacacgccgccgattgtcagaaaaacgggcgggagcacaaatccggttaaggacttgagcatgtccatcgaaagcagggccaaaatacctccgcccacaagcaggtaccagctcaatacatcgtaaacagcatcgagcggcctgccgtttttgatatccatatagcccttgatgccaaggccgataaacaggtggatgatgccgagcagaaaggcgaccatcaaaagcgtcatggaattggtgccctctacgggattgaaccataccggcggaattgcaacatcggcgttaaaaaacgttttgccgatgaccgtgaccgcgtcgccgaaatagctgccgaaaaggatgccccaaaacatggtggagatgccgcagcccaaaaacatctggacgctctttttcagcccctgctccatgtttttgaactttttcaggacaaacgcgcagccgagcgcaaggacgaggccgtaacccgcgtctgagaacatcataccaaaaaagatataatagaaaaccgacatcagcgaagtggggtccacctcgcccctgccgggcaggctgtacgtttcaagcacgctctcgaccggacgggcaaatttattgttctttaaaacgacgggcggctgttcctgtgccgacggcgcttccagctcaaccgcggcgccgtatttttgttccagctcagaagcgagggcctgcccgcgtttttttacgatatagccggtgaggatgaacacatgctttgagttttcgagcttttcgattacgccgtatttttcggcgcgcatgacgtaataatcctccataaaacgaaacgcgtttttcatgccgcggaagctttgaatcataagctccgccttgtcgattgcacgctccgcttcttcgattcttccttcaagctccgcgatacgctctgacggcgtgaatttggaagcaaccggcggctttgcatagccaatggaccgaagggctgcgcctaccttctcttcatcctgcttcctgcacagcaggaaaatacaggtctgatagtctgtagcgctcacgatttcaagcgaaagcgcgtccgtttccggcgattcctgtgccaggtgctccatgacggcttcgtatgtccaaaattccggaagtacgccgatgaaggcggcggtcgtctttgtacccggaaagcgcatcgaaagattaaagctttcccatggctcgagcgcctcgatttgggattccaggcggataatttccgctttgttgtccgcaacctccttacgcagggaattgacttcaaaagcgacacgcatgatttcctgggcgtcatctacaaaagcgtaatagtcctcaacggaaagcgggctccttccctcgaacatggaaagaggagattttttctccggaaaatattcctgtaaaaccgcataggcttgtcccgctgaggcggagcttttcataaagaccgcctgcttctgtgcggtttcttccttggaaaagacgctgtgttcaagctttaggttttcgatttccactgctcccttgcgctggagcgcctctaaaattgccttccggtgcttttttaatgcgtagatattgattcgctgcatttcaagtacagccatttacagcacctccgtttttaaacgcttgacaggcggtatagactgaaagcgttcagataatccgcccgataattttttcgattgccgcggactgttttttcattgccgccgcttcaagcgccgccgtttctttttgcgcctgctcccgcgcgtccttgagcatgctgtcagcctgctcctgagcctgcctgatgcgctgctgtgcacgggcatgcgcttcctgttccattttaaggacggcctgttcagcgtctttgtttgccctgtcgagaatctgctgcgccttttggcgcgcatcctgttcggcctgctgggccctttgttccgcttccttgacctggttgaccgtttcaagtgccatttgaatcaccaccagaaaaaatgtatattgctattttataccagattgcgtctgctcgtcaatgcttttcacacaataaaaggctgttttttattcttttttcataaaaaataaaaggaaacgctgtttgttgtgttttaaaatccttaaatttgaatcaatgttttctgttgatttggaataagcacatgacgcatacacccgtcatgctgccgattacgaagccgattacaattccgaccgccaatgaaaaaaactcccttcttttttctttatgggaaaacagattgtgacaataaatctgaaaactatgtgcaataatagctttgcaccggctacaggaaaggatgtgagcggtatcaagcagacggtttatttagatattttgctgtgcctgaatctgtttatcaattattttatactgcttgcggcctcgaaattcacaaagctttcaccaaaacgacgacggattgttctgggagccgcgtttggagcgttatgctcccttattatattattgccgccgctgcacagcgtgctgaattttggcataaaaatgctcgttgccgccggaacggtttttttgacgtttggacgacagccgtttaaggtctttttaaaaaatttcgcggcgttcctgcttatcagcttctgcttcggcggcgcgatgattgcgctgtggtttgcctttacgccgaagggcatggttatcaacaacggcgccgtgtatttcaatctttcgccgcttgtgctgattgtctccacgctcatttgctatctggtcctgcgccttgttagccggctgtccggccgcgaagctccgcaaaaggtaatttgcagggtcaggcttgccgcagaaaacgggcggcgcgccgaattttttggaaaactcgacacgggcagcagcctcgttgagcctttttcgcaaagccctgttatcgtcgtggatttcaataccataaaagatattgtacccgaatccatcaaagaatattttttagtaaaatgcgcggctggaagcgaaggcgcttatccctcgtcatcgggcgtccggttcgtgccgttccagtcaatcggcggggaagggatactgcccgcattcaagccgaagcaggtttttatagacgacacgctctgtatgcgtgaaatatacatagccgtatgcgaaagggaacgcttgagcggcgaatgccgtgcaattatcaatacgcagtgcatcgattaaagcttttgggggaattgctatgaatctattcaaaaaactattttacaaaatcaggcggatgcttggttttaccgacgaggtattttatatcaacggctcccagacgcttccgccgcctttgacggcggaagaagagcaaattgtaatggcaaatatttccgcgggtaaaaaaaacgcgcgcgagccgctcattacgcataacctgcgccttgtcgtttacattgcaaaaaaattcgaaacgagcggcgccggcgtggaggatttgatttcgattgggacaatcgggctaatcaaggcggtcaacaccttctgccccgcgcgcaatatcaagctggcgacatatgcttcacgctgcatcgaaaacgaaattttgatgttccttcgcaaaagctcccagctgaaaaacgagatttcaatcgatgagcctctcaatatagactgggacggaaacgagcttttattaagcgacgtactcgggagcgacagcgatatcgtcaaccgcaacatcgagcaggaggcagaatgcaacctgctgctcgacgcggtatcaaagctcgggcagcgggagaaaaaaatcatggagctgcgctttggattaagcggaaacaaggagcacacacaaaaggaggtcgcggatttgcttggcatttcacaatcctacatatcgaggctcgaaaagaaaatcatcgaccgattaaaaaaagatttaagcccggttctttaaacataaatacatgtttaaaaacagatgcatgattctgccgaaaacggaaatgaatagtactgtgccgaaaggcaatccattatttcagggagtgtaaaaatgaaaaagatactttccgttatcatagcagtcagctgcatggccgtattatttgtcggctgcagcgcggaaaacggcaaaatcggcaacggtgtcaacggaaccgttacagacaaccagtcaaacgtcagctcgaaccataacaacgcttccgctggcatgaacagcagcatgggcggcgcaagcggctctctcggcagcgctatcgagggcggcgtgtccgccgcgggcagcgccatcgaaggcggcgtatccgctgccggcagcgctatccaaagcggtgtcgacaatatgacgggcagccagcaaagcagcgggaacaccgcaaacggcgcgtctgagaacgtatcgaacaccggcgtgtaaaaacatgcgaaacaacaaaaagcggtcctgagatttttaatcccgggaccgcttttatttgttattaaataattacatcatgacggagctatcaaaatactgttcctgaaaggacacaagcgccattatttcttcgcgcgtaaaaaacaaaccctctggacaaacgacccatttttcttctacatcgtcattgcggtgaatgaccgcgataacggtacctgtaaaagattcaacgggaacgtcaactcccagaacataggcgtcctgctcttccccgtcgccgcctataaccccttctatatagccgtaattaacagggtaatacagatcgggatgctcagggtggcatgttccaagcggcctgtcaatagtgactgttaccgtttcgccaatcataccggctccacgccggacacaggcgttccctccgctcatgttctttaccattttgatatgcgggcagtgctcgtcctgataaaccccaccctgtgcggtatagccggccttttcataaaagcgccgcgcctgcgtctgcgcggaaagctcaaacacacggcctccctctttttctgccgcttcttcaagcgcttttacgacggcaaggcctaagccccggcccctgtaatctttacggacggcgattcttcccaggtgccaaacggcagaactgttatcttcctgaaaagtacgcccggttgccgccgcggcgccgtccaaatatatgacgacgtgcagcgcttttgcgtcgatatcgtcgaattccctgagaaagccctgttcctcgacaaacacctgcgtgcggatttccgccgcttcgcgcggaaggctttgatatgttttaatttgcatattgtcatccttttatttttatcgctattccgcagccaaggcccaaatttatggctgcttccggacttcatccggctccatatggacgaccagctggttgaacgggatatgaatgccgtgctcgtcgaacatcagctttaccttctcctgcatttcgtaataaagaggccagtagtcgtccttatggcaccatagcttgcagtctatggaaatactgctgtccttatggtcggcaatgccgacgaccggctccggttccttcaagaccagcggatgctctgaaacaagcccctgcaaaagctgctttgccgctacgatgtcgtccccatatccgacgctgtaggacaaatcgagcctgcgcatatcgtgcgaggtaaagtttgtaacattattcgcggtcaggcgcgaattcggaataatgacctctttattatccaccgtgttgagaaaggtgttcataatttcaattttcgtgaccgttccctgaaggccctcgaactccaaaaaatcgcccgccttgaacggcttggtgatgatgataagcacgccgcttgcgatatttgacatactgtccttaagcgcaaggccaacggtaaccgccgccgcgccgactgccgcgataatggaattgacgttgacgccgagctgcgcgaccgccgaaatgatgacaatgatacgcagcgcgcagagggaaaacgagcacacaaaggatactgccgcctggtccgcctttccgcggagcattgctctgcggataagccttgtgacggccttcgaaagccaccagccgattgcaaaaatcagcacggcggcaatcagctttgggaaaaaggcgactgcccagtcccacaaatccaaaagccatttttgaagcagggaaatcgtctcctgcggcgtttcgccaacgagaggcagtgtgctttcctgcgctattggaattaaatgcatgaataaaccagagctccttagggctgtacctcatagtcatacgcagcgttcaaaaactccatatgctcagaggctgatgttttttcttttaaaaatctgccgcgaagctgctcgccgccgcttaaataaacgacgccctctcccgctgctttcccctccgaataagagccggtatagcggtggtcgggataaagcatggtgcccttgccgtgcggcagcccgttcttgagtcctccggaataaacgccgccgcaaagcggctgctccaccgcatattcgggagctgtgcggaaggtctcgtaatcggtgtttttaagcttctccacatatggcaggccggcaagctcggccgtgatgaccttcatgcttttaaacggctccccgtatttaaaaatcccctcaaacgtcttttccccatactcattaaaggaggcgcccattccctcgggctttccgtccttgatattcccttcaaacgcaagcgagccgtcactgcggaagcggcgctcgtaacggcaggcgccgtgttcgaaaatacactgtgccgcaatcctttggccttctatctcgttaatgcgcccgtgcggttttccttcctcgaaaaaccccgcgaaacggggccggccgcctgcatatgaaacgccctgcccgcaaggtacgccgccttcaaaaaatccggaatagagctgcccggcgccgctgcagaggataccgaagccgctgcgcccgccctttgcaaacgaacccatgtaaacacatacgccgccttcgtattccctgccgattccgcttttttcaccttccgcgaaggcgccgtcgtaaacggccgagccgtcacggtaaagcattccatgcccgtcgtacaggccgtccttgagcgtccctttataggtaaccgcgccgtcctgcgcaaagcaggtaaattcgccatgcatggagccgttttgaaacagcccctccataaaggcgccgtcctgcttataaagcctgcccagcccgttatacaagccgtcttgccaaaggccgtcgtaaatgagcgcaccggaagccgcgcgcctcacagcgcggccgttcgccttgccggctgcgaattcgccgcaaacggtcccgccgtcctcaagatacagcgtcccttctccctcgtattcgccgttatggaacgcgccggaataagcaagcgtgccgtccggatggaagagaagcccttccccttccttttggccgtttttatagccgccgctgtagagtacgcggccgtatgaatcgagcacggtggccgtaccgttctgcctgtcgttcacaaagcccgtaacggtcatggaaccgtcatcctcaagcgtgattcccgctccgtttttcgtgccgcccttccagttacccgcgaaggtcatgcggccttccttatcaaagcgtgcgcagacgccctttggatggtcgtcttcaaacacgccgacatgcgcggagccgtccatcggccggaacgctatgccaaagccgctgcgtttgttttccttccagccgcccacatagctcaagcgccccgtcttaaaataatacgcgccgaagccgtcgcgcatatcgcaaagataatccccgtcataaagcgtcctgccgttttgcagctgtgtacggcccatgcctgtccgccgcccgttttcatcgagcgggccgaaatacaggcccttttccttagcggaaagcgcaatgatcttgtcggcaggaaggctgccggcaggcgttttcggcgcggctgtaccttttgccgttttcttctgcgaagccggcttttcaatctttacaacagcaggcggcaaatcggctgacacagtttctgcttccgcggccttttcagccgcgtccgttttattcttgtccgcgctcttttcaggaacgggcgcaggcgtttccataactggggcgccgggctgtatatttacagccaaaacggacttttctggcaatatttcagctgttttcgcagcttttgcgtttgtttttgcctcttttgttgtttttactgccttttttgcagggcggggctgctcctgcaatgcgcctgtaaacggggaagctgccgtcctgatatcaaaagaaagcatctgcgcatccgccctcagcgcttctttatcaaattgaaagccgcccggcttccttctgggcttcgatgtcctgggcttattgctttcttttgccttttgctcaagctttccctcccaaagggaaagcttttcatcgtcacagaaataggcaagcccctgctgtgtctgcgcgcaggcctgcggttcgacttcccgcaccaggtcggaaaggagcgtttcatcctccggaatcggaacgctttttaacaggatgggcgttttgtcctgtttcggataaagcgcaaggcacgcggtacgttcatttgtccacggcattaaaacagcgttaagcgtcttgccctcaaggtcaaaatattccgtacgaagccaggcgtgcgcattgtcgaagtacgctttttttacgggcgctccggaaaagccctgggattcaacccggtagccggatgcgccatcggctaccgccgtttcctcctgcctgccctggacctcttttttccattttaagggtttgtttttttccattgcgtaagcacagcggatagattccccctgtgccgtcataaacagcctgtccttttgttttttgcccgacgtaaagtaatcgcggcgcacctttaaaagcacgtcgcttgaaaaccttgccggctcctccgccagaagataggctgtaaaatatggtacggttcccgccacaggcggcttgatggtatatgccatatgttatgcttcccttttaaaatttatcttgttccctgatatttgcaatcgcgtctgaaattacgcggctggcagcccttatctgatgcccctgcgcgttttcagtcagtcccatctgttcgggcgtaatggggtccccgtatgtaattttcgtcgtgttgaacactttcattttcccgcccttagccgtaatacacgccggaacgacgggcaccatcatctgcgccgctatcagggccgcgccggaacgcatacgcagcagctcgcccgttttagaacgcgtgccttcggggaaaatcccaagtacgccgccgctttccagcacggaatccgccgttgcgaacgcctgggcgttgtcgtgagattcccgcataacaggaaaagcgccgagcatagaaatgagctttcccaggaatttatgcttaaaaagctgctccttcgccatataacggatggttctcttctgcccgattccgagcagcacagggtcggcgaacgactggtggtttgcacagatgatatacgcgcccgtttcaggcagattgttcctgccggtaaagcggtagcggtataaaaccttcataaggggcgtgcataccgccctgccaaagctgtagagccattttttctgttccattatccccatcctcccgatttgcaaaaatcaaaggcgcttttctatcacgcccagcaggcgctcaagcgaggtttcaagcgtttcgcccgacgtatcgacaagtacggcgtcccgcgccggttttaagggtgctacctccctgtgggaatcgttgtagtcgcgcgtttcgatatcgcgcaggatgtcgtcatatacgacgtccatccccttttccgtcagttcttcatagcgccgtttcgcgcggcactcggcggaggcggtgaggaatattttaattttggcgtccggcaggacaaccgtgccgatgtccctgccgtccatgattacgtcgctgttctttgcgatgccgcgctgtaaaccgagcaggtatttccgcacgacaggcagcgcggaaatgccggaagatgccatggaaacctccggcgtacggataaagccggttacatccgccccgtttacatacacgcgctgctcgccgttttggaatttaagctggacatccgtatggtcgagcaggcattccacctggttttcatcactgattttaacgccgagcttcaccgcgttgtacgcgatagcccggtacagcgcaccggtatccacataaataaagcccagcttttttgccgcgagccttgcgatggtgcttttgcccgcgcccgcgggaccgtcgatggcgattgccgtcataatatttttcttcccttctgcgattcacatattttcatccgctgcggaaatacccgccagatagcctgtagaaaaagcgatttgcaggttaaacccgcctgtataggcgtccgtatcgattacctcgcctgcgaaaaataaattttttgtaagctttgactccattgttttggggtcgatttcctttacgttgacgccgcctgaggtaacgatagcctcttcaaccgggcggaagccgttgataacaacagggaattgcttaagcagccggccgaaggcatggcgctgttcttttgtaatggcattgcactttgtttccggccggataccggagcgcattaccatgacgggaatcatcgtgcgcggcaaaagctctgaaagcgaattgcaaaaatccctgtttttattcttttcaaagtcgcgcagcagccgtttgtccagctgttcaaacgaaagcgcaggcttacagtcaatatctatgcggtacctgcccgcgcgcataccgcgcatatgggcgctcgcgcttaaaataacgggtccgctcagcccaaaatgtgtaaagagcagctcgccgaaatcggaataaatctctttctttttgtccgtatcagttaccgtaatggaaatattacgcaaagaaagcccctgcaggtccttgcaaaaggaatcccgcgatataagcggaacgagcgacggcacaggcgctgccaccgtatggcccgcctgctccgcaagcgtatagccgtcccccgtcgagccggtcaatgggtacgatttgccgccgcaggcgacaaccacacagccggcccgcaggctttgcccgtcttcaagcactgcgccccttgcctcgccattttccaaaatcaggcttttcaccctgccgtttatataccggcagccgcagtccattagaaaagaacgcatcgcgtcaacaatatcggccgctttatcggactgcgggaaaacgcggtttccgcgttccgttttaagggggacgccccgtttttcaaaaaagcctatcgtatcctgcggggaaaacacgctcagggcgctgtataaaaagcgcccgtttgtcggtacagaggctataaaatcgcgtgtgtcgcagttatttgtaacgttgcaccttcccttgccggtgattaacagcttcctgccgggacgcctgttgcggtcgacaattgtaacagccgcgccgttttgtgccgctgtacccgcggccatcatacccgcggggcccgccccaatgacgagcacttcctttttcgccattatgcctcttcccccgctgtacccgcactgccgctttcggaggttttcgcgtatacgtcgtattcgtcccatgcgcgctcaagcttacggaaggtttccttaacctcttccttcttctgtaggaccgtcgcaacgatgagggcgtttatcatgctcagcggcgcgacgagcgaatcgacgaccgaggccatgtcgctgcgcgcgagcagcacgtaattcgcgaccgcgacgagcggggaaatcatgctgtcggtaagcgcgacaacgcgagcgcggcggtcggatgcaaactgcattgcctccacagcccgtttggaatagcgcgggaagctgatgccaatcatgacgtctttttcaccgatgcgcagcagcttttcatatatttcggtgctgctcgtcgtacttacgacgtggacgttgccgaaaatcaaatcgaagtaatagcctaaaaagtttgcgagcgccgaggagctgcgcaccgcgaagatataaatattctccgcccctacgattgcatccaccgccgccttgaaatccgtgcgcgaggtctcctcaagcgtcgtcctgattttatcgatatcctgattgagcacgctttcgagcacgctctgtgagccgatgcggttgcatgtgacctcaatgcgctgtacggaggtaagcttgtcccgaatcatttcctgcatggccttttgcagctttgggtagccgtcatagccgatttccgtcgcaaagcgcacgacggtagactcgctgacgccgaccgtttcgcccagcctggaggcggtcatgaaggcagccttgtcatattgttcttctatatatcgggcaatgcgcttctgcccctttgagagcctgggctttaactgttcaattcttgacaataaatgtttttccatgattttcttctcccgcggataaggcccgcccatccttcttctgttgcattatctaattaattttaatacataatcctgccaaaatcaagcgaaagcgcagattcaccgcctgttttttgcaggatgcggcatctatccttcaaattgtttgcctttcccccaaaaatatgataaaatcaggtaaaatatttcgtaaagggttttgtttatgattgctgttatcgactacggcgcgggcaacctgcaaagcgttgtcaaagcgtttaaccatatcgggtgcgatacgaccgtcacaagggacgaacacacgcttttggaatgcgacggcgcaatcctgccgggcgtcggctcgttcggggacgcgatggactgtatggaccgttcccatatgagaagcgctgtgcttgaatatataaaaacaggcaagccgcttctgggcatttgcttgggcctgcacctgctgttttccaaaagtgaggaaagcccgaacgccaagggcctttccctgctggaaggctcgattacaaaaataccgaacggcggcgggaacctcaaaatcccgcacatcggctggaattcacttgaaatcaaaaagcacgacggcatttataaagggattacaggcgagccctacgtctattttgtccattcgtactacctgcgcgcgaataatccggcaatcgtttccgcacaggcgcagtatggtacggcaattgacgcttccgtctcttaccaaaacattaccgcaacgcagttccatccggaaaaaagcggagaagcagggcttttgatgcttaaaaactttgccgatatgacgcttgccgccgcaaaggaaaggggttgagcctatgtatgcaaaacggattatcccgtgcctcgacgtaaaaaacggcagggttgtcaagggaacaagctttgtgaacctgcgcgacgcgggcgacccggtacagtgcgccgccgcgtatgacaggcagggcgccgacgagcttgtgctgctcgatattaccgcctcgagcgacgcgcgcaaaatcattgtagatattgtaaacgcggtggctaatacgatatttatcccctttaccgtcggcggaggtatccggactgtggacgattttacggaaatcctgcgcgcgggcgcggataaggtgtccgtcaattcagcggcggtactgcgtcccgatattattaacgaggcctcctacaaattcggcagccagtgcgtggttgccgccatcgacgcaaagcgccgcgcagaaggcggctgggaggtttatatcaacggcgggcgcacgccggtggggctcgacgcagtacagtgggccatggaagccgaaaagcgcggcgcgggcgaaatactgcttacgagcatggactgcgacgggcagaaggacggctatgacgtcgagctgacaaaggcggtctccgaacgtgttggcattcccgtcatcgcaagcggcggcgcgggaaagcccgcccatttcctggatgcgtttacaaagggcagggcggacgccgtgctcgcggcatctctttttcattttggtgaaatcgcgattcctgatttaaaggcctacctgtcggagaacggaattccagtcagaaggtaaacagaagcgcgccggataatccggcgcgcttttttaccgctttctattcattcaaatgcaccctgggattaaaaattgatgccggccttcctcgcctggctgcacagctccctgacagacagcttatattccttcccatccttgataaaatgggtgccgcactgcctgaattcaaaatggacgccccttctggcgcattgctcccggatggaaagcacccagtcataacggaggggcctggcgtccctgtctgactcgccgcctaccacgaccagctcgacgccgtccaaatagcgctccaggttaatctcttcaatcagcggctggcaaataatatttttgtgcttgattggcagagcggagaatatcttgagcctttcgtccgcccgcttttggttttctacagtacagccgaccgttacattttcatacccgccgttccagtcctccggaatgcagctcataaaacgttcgattcttttggtcaaaaacaggaaatgcaaatcagggcgttcctttatcatcgcccagcactgcgccctccatggatcggcctcttctatcaaaaaatcagtggaaaagcacaggtagacgagctggccgcccttcatcctgtattcgccgtttttgttccgtttgacaggcgcgtcgaagccgtcgagctttacgatactgccggtatcgactccccttttcgcatcccctttgtggatatagcagtatttgcagccctcactgtacctatggcatccccgccacggtttccacattgccatagcttcaccgccttaaaacctggaattcttgtagtcatacggaatacttgtaccaaccactacgtcttcaatcttctcaataatcagccagtcgtccatgttaccctgatggtcgaaatcaagcggttctatttcgcggacatcctcaaattctaccaggcaaaggcattttttatgccagcgcgccttttgcttgtcagacaaatttagcttaggctggcgctcttctaaaacgcgtgtaatctcttcatcaggcagcttcacaaaattctcggcatttttgactgtcgccgccgccgtgatttttgccgttcccttttccataaaataaagcgtttcaccggcaaagaccctgctgtgcggtattttcctgccagcggcgccccgcacaaccatagtttttgttccgtttaaaattttatcgagaaccttttcgcccttttttcccgcgttgtcgcagtaaaccaaatgcaccatagctttcatcctttcaaatttgcccataagagcagtaaaaacttataacaagatatcccaacgcttatgaaacgaaaaacgggtgggcaggaaagcctgtccgccctgtttcgggacgttgtaaagcaacacaaattttacataatatattataccactaaatctgtaaaaatgaaaggctgatactccctgccctcttttttgttcttgttcgtggactattttaaaaaccattgggatgagatagaatcccggcaaaattgcggctgcttgatgaagcaggaatatcgccttatattttaccaattaaacgcagtaatttttctgtatatttttcggagtgattgaggcttaagtctccgtgacagtatcccggcaaaatttcaaatgttgaatcactgatatttttgctgataagctcagcggattttttcatgattctttgttccctgccgccggctaatacgagtgtttttgaccggcaggaggaaagcgtatctttcattttgtaatcagaatttgcccgcaaaaaagctgccatgtcttctttcctgatgatagcgctgtctttgaagtaatcttcaaaaagcggctgctttatatgcagggaattaaactgtaattttgcaaaccaacgcttttttgtcaacggataacacagaggaaaacaggactttacaagtgacgctgttattttcattggcatagccaatgcgctctctattatggcaaacctacagacatcttttctctgcgacaacatttcaaccaatatttggccaccgagagaaagtccgccgatgaaaaggacctggccgctataggcttcatctatatattgtattagttttttggcattttcttctatagaggaaaatttactgtcacttccgctgtgtccatccaatacaggcactaaaatatgaaatttatcttccagctgttctgcttcttctttataattccaaggggcaagaccaccgccatgaagaagcataataacgtcttgattttcttttccgtattcaacgactctcatttttgttaccctcaagcccatatttacagttatatttcacattataatatcaaaaacatattttttatttatttaaaagaaaccgtatataaagggccggcagtgcggtgcactgccggccctattgcttttatggtttatcccgccagaacatgattcacgacggtgagcagcttctcttcgttgaagggctttagtatgtagccctttgcgcccattgataatgcttcttccttatggatatcctccgtctgcgcatagaccattacgacctttgtttcaggcgacgcctgtaataccttccgaagtaaagcgaggtcttcgctgccggggagtgaaccgtcaagaagcacgagcgtcggggcctcgttttgaacgcaatcaagcgcttcctgcgcgcttgccgcttcggctgtgtcggtaaaccctgcgttaacaagcacgttcttcgtgagctttctggggaacgataaatcgtcgaccaccaaaatagaactgttcatttccttaatttttcatctcctttctgtgtctcgcggttcggcttgattataacacagcggagatttaagcacaacggatttcacagaaagttcaaaatgatttaaccgttttccggcaaactgttttgattctgacaaagttgtaagaaatgatggaagcacacgggaccgcgggcggcaatttgcatttttaacgtcttatacctcaaccgtccagccgtgggcatccgctacgcttccccactgtatcccggttaggttatcataaagcttctgcgaaatttcgccgattttgccgccgttgaacgtcatgaccttatcgccccatttgagctcgccaatcggtgagatgacagcggctgttccggtgccgaacgcttctttcagcctgccctcgtccgcggcctttgcaacctcgtcgatggaaagcgcgcgttctgttaccttgtagccccaggagcgcagcagctcgatggaggacatacgggtgataccggataggattgagccctgcagcgccggtgttataatttcgtcgtcaatgacgaagaacacgttcatcgtgccgacctcttcaatatatttgcgctccacgccgtcaagccagagcacctgggtatagccctgcttttcgctttcgtcctgcgccttgagggacgcggcgtagttgccggctgtttttgtaaagcccatgccgccgcgcaccgcgcgtacatagttctgctcaacatagatgcgaaccgggtcaagcccttctggataatacgcgccgacaggcgagcagataatgcagaaaatcagctggtgcgccgggtggacgccgataaacgggtcaaccgcaaaaataaacgggcgcaggtagagcgacgtgccttcggcagtcggaatccagtcctcttcgattttcacgagctttttaatggcttctacgcagaacgcctcatcgaccagaggaatgcagagcctctcattagaaacattgagccttgccatgttcttctccggacggaacaaaagcgttttgccctctttggtcttataagccttcattccctcaaagacttcctgcccatagtgcaggcacatggcggccggatccagcgcaatcgggccataagggacaatccgcgcgtcgtgccagccctgtccctcgtcatagttcatcaggaacatatggtcggtaaatatcttgccgaagccgagcttgctttcgtctgtaggcttttccttcggtgtcttggtcaattccactttgatttcctgcatcgtgattccctctctcgaataaattggtactattttaccataggaatgcttcttttgcaatattgagccctgcaaattgcatcatccgttttgtattgtttttgtggaaatttgttcgattaggcgcgccatatcgttcggtaaaggcgagaaaagctccatttttttgccggttattggatgcgcaaaggacagccgttcacagtggagcgcctgccgtgctatatattccgtgctccctccatacatatcgtctcccgcgagcggatggccgaaataagccatgtggacgcggatttggtgcgtcctgcctgtttcgagcgtaaactgcgcaagcgtatggttatgatttcccgcaagcgttttatagtgcgtaacagccctctgcccgccgttacccgcctgacgctcaattgtatgcccttccttgatgcgtattggcgcgtccaccgtgccgcttcctgaaaaaacgccttcacacacggcgatatactgcttttccacgccggttttgaggcaaaacgcgctgtacggctcctttgctgcaagtaccagcccggtcgtatccttatccagccggttaagcggccggaacgcatagcgctccccctttttcctcatataatacgagacggcgtttgcaagcgtatctctttgatggccgcatgaggtcgggtgtaccggcatgcccgggggcttatccaggaccaaaagatgggcgtcctcatagatgacggtaagtggcagcatggcaggctctgccgcgcaggtttcctccgggagccgcagcgtaaccatatcgcccgccgctacccgctcgataacgcgcgcatgcctgccgtttcgcaatatgccgttttctgtctgctttaatgaaaccatcaaatgggacgaaagcccgcagccgcggcgcagaaaggttttgagcagcgcgccgtcaaattccgcagggaccgtaaattttaaaagcctgggattttccatcttataagccccacccgttctgtgagaaatagaatatcccggcggcagccacgatttccgcaaaaaagataagcggaacgccgagcataaactttagcttgcgcgttttgtggtgaatcaggcgcatcgtcaaatacatgccgatgctgccgccgagggccgacaggagcagcagggtgctttccttaatacgccagcgcccgcgctgcgccttgcttttatccaaggccgttatcagggcggctaagatattgattaaaagcaggtagcccataagcagcagccaccagatattttgcggcatttctttcccgcctttcgcataaatcaaacgtaattttattataaatgaaaagaaagcgattagaaaaccaagcctgttcccacgggacggctccagggaaaggaaggaatgttatgtcagaaggaaaacgcaggtacgcccccatggtaattgccgtcgtactgcttctctgcgcggtaggcgcttcgtatgtaacgctgatgaatgaaaacgggggaaatccgcccacagcgcctgtaaacgggacaaactccggcggagccggtaatacggacaaggcgcacgaggacggcgcgtatgtacagcacgagggcgagatgatggctgtatgggtgccgtatatgtctcttagcgtggaggataacccttcgcaggaggcgtttgaaaaaaaattcgatgcaatcatcaaaacgtcgaaggaacacaatatgaatacattgattgtgcatgtacgcccgttcggggacgcgctgtacccgtcgaaatattacccttggtcgcatatcctgacgggcacgcagggcgaggaccccggctacgacccgctttcatatatggtggaggccgcgcacaaggcggggcttgagttccacgcgtggctcaatcccctgcgtatcaaggtaagcgataccccgaaaaagctgtccggcgacaacccctacacaaaatggaaaaacgacaagggcaagagcggctatgtggtcgactgggacggcgatttatactttaatcccgcctatcctgaggtacgcaaatatatcatagaatccgttgaggaaatcgtaaaaaattatccggtagacggcatccatttcgacgattacttttatccgacgagcgacgtcgattacgacaaatcctcgtatgacgcctatacggaaagccttggaaaagacacaacgccgcttacgcagaacgcatggcgaacggcgaacatcaacacactggtgtcaggcgtttacagcgccgtacataatttgagcagccataccgtgttcggcatatcaccgcagggcaacattgacaatgacatcagcatgggcgcggacgtttattcctggggcaagaccccagggtatgtcgattacatctgcccgcagatttatgtaagcttcgaccacccgctgctgccttacgacagcaccgcggacgaatggcggcagcttgtcaaaaacgacggtgtgaagctctatatcggccttgccgtctacaaggcgggcagcgacgcggacgaaggctcctgggagggctcacaggatatcctgcaaaaggaaatcgagtacgggcgcgagctcaaggcggacgggtttatgctttattcctacgactacctggtaaacgaccagacaaagaaagagattgagaacgtcatgaaaatcatcgaagcaggctaggaatccagctcacaggtgcatttatcctgctcggcgcctgtaatgcgcaccatccgcgcctgcccgcacaggtcgtcctgtgttcgcaggataacaggcgtatagtttctcgtatatccctcacagaacccgccgtttcgcttcgtttcaaacaggacctcttccacaaggcccgcctgctcatttaaaaaagcagaacgcgtgcggtttgttaaggcaatcatctctttcgagcgctgctcctttacctccgcgcttatctggtccggctctttatccgcctttgttccgggccggcgtgaataagaaaacacatgcgcctttgcaaagccgatttcttgtgcaaaagccagcgactcttcaaattccttttgtgtttccccgggaaagcccaccataatgtctgtggtaaccgccgcatttggaaacgccgcgcgcaggttttggacgattgcccggtattcgtccggcgtatagtggcggttcatgcgtttcagcgttcccgcgctgccgctttgcagcgagaggtggaactgcgggcacagctttttttgcctggaaagacgcgcaatcatcgcctcgtccattcgttccggttccaacgagccaagccgcacgcgctcgattccatctaccgcgcaggcagcttcgacggcgtcgcccaaatcaagcccccattcctgcccaaaggccgagagattgatgccgacgagaacaatttcccggtagcccttccctgcaatcctcgtaagctcttcagtaagctctgaaaggggcttggagcgtacgcgcccgcgcgcgtacggtatgatgcagtaggaacagaaacggttgcagccgtcttctattttgacaaaagcccgtgtgcgctcatggaacgcctggactgacatgctttcaaaagaggtgtcgttttgatgcggctcgatttgaaataccggccttcgcgtctgcaaaaaattttccacagccggaagaagctctcccctgcatttgttgccgaggacgatatccgcctcgctgaattggccctttctctccgggaacgcctgcggcatacatcccgtcagcactataacgcaggctgggttttcacgccgcgtccgccgtagaagcttcattgccttgctgtcgctcaccgatgtgacggtgcaggtatttatcacacacagctccggcttttcagtaagcggcactggcgtgtggcctgccgtcagcagcgcctcgtgcataacctgcgattcatattgattaaccttgcagccaagggtaagtatggtaaaagtcatggaattctccttttttgcgttttccagaatagtatgtgaatttgctttgtctgttgtgaacaaaatataaacaagcgtgtgaaaaagaaaacgctataagtaaccgaaatcttttttgtcgaatatttggattgaccttctgcaatcacagtggtactatagagacgaaatataattgtatagttggaggaagatcaaaatgtacagcacaacgatcgcaattccgaacctggaagcggcaaagcagtttgtaaacatttcgagcaaatatctgaactatgccatgagcctgaaatgcgataactatatcatcgacgcacattccattatgggcattttaagcctcgacatgaccaagccgattacgcttgaggcgcaggagaatttgccgaaagagtttttaaccgacattgccccgttccagaatgccctggcaaacgcctgagcataaggtcttataagagtataaaagcacgtaaacaaaatgtcaagaaatgcacgaagcggacagctatgctgtccgcttttttcttgtattcagcaaaagagccttccataaagcggaaggctctttttagaaaccgtgtatcagacaataaaggacgggtcgaaatcgtaggtaccgtacttatagtggccctggctgtcctgggacgatttgtcgcagtagaagcctgtattgttcggaaccgctgtcaggtcgatatcctgcgtctgttcgccattgccattgctgaagatgatgtggtcaaattcgcttgtatcgattgtggcggaataaatcaattcgccaaagctgttctttccaatcgagttaagctcaacgcccggccattcattgttcttggtggaagcgctccaggcgtaaagatagacattgttccagtttacactgtttgagaaataaacagtaatcgtcctgcccggattgaccgggtcggacgggccagacgggtcagagccttcgatatcaaccgatttttcgtttttaccattgtcgttaaagattgccttggtataaacgccagctggaatctcaattgacacgcctgtcagctcgagtccgggccatgcgcctgtctctgcgaaattttcagggccggggttgtagcaatagacatgcgtgggcgtaaagcccaaatcggaaggcacggaaacggtcgtcatcgcgatatcgtatgtgccgttcttgacatccatagatgccgactgcatacgtgctgaaaccttcggcgcgccctgcgggtcggcgcctatttcggggctgtctacaaagataacagaggaatacagcccgtcgggaacggtaatggaataggtgttcccgtttgccgacatcggctcgccgggccattcggcgttcttcgtttcaccatcgtaaagataggcgtaaacgtctgcgccccagcttgcgggcttattgagcgtgagcgtaatattttctccgggaactaccgggtcggtcggtatgacaggctccgtcggagcagaaccctcgacgtcgaattcctcctggtttgtaccgtcgtggaaaatcgcctttgtataaacgcctgccggaaccgtaatagaattgcctgtaatggcaatgccgggccatacgttcgtttcggcaaagctgttcgggtcgggattataaaggtacacgtgcgtcggggtaaagctgaggctgccggcggttaccgtgacctcttcgattgtatagggcgcctgcgttacatcgagctgcgccgactgtacgcgtaccgcgattttgggagcgcctgtgccgtcgaccgcttcatacgggctgtccgagaagataactttatcgtacgccgcgtcctcggggacggtaatcgtataggtattgcctgacttcgtcatcgcttcgccgggccattcggcgtttttgccccctcctccgttgaagaggtaggcgtaaatgtcatcgccccagcttgcgggcttattgagcgtcagcgtgatggtgccgccgggaactacggtcggcttttccgtcggggtaaccgggtcggtaacaggcgggttggtcggcgtaggcgtgaccccgccgccgacatacttgccaatgtcgtacctagagcccatacccgcaaggaatttctggatttcaaggacgtccgcagtttcgagcttgccattggagtttacgtcgcccgccgcaaacgcggtgccccccaggacaaacatggaggcgaggtgcttctggatttcaaggacgtctgcaagcttaacatggccgtccccgtttacgtcgcccagcatatatttcgttcccgggtcagggttggtcgggattgtctccgtgggaataatcgggtctgtttccgtgggcttttccgaaggcttcgtcgggtcggacggctcaacaggcgtttcgttcgtactgtagccgtaatccttccattccccgttctgccaaatcatagagccattgagcaggaacccgcccttttcacggttcgcgggcgtagccgccgtaccgaagtttacaactgtaggcggaaccgtcctgccgtcaaggcctgttttaacatggccttcgttgaattttacatacgcggagccggtaacgcccgtaagctccgccttgtatatattgccggaaacctttgtcatctcaaagcccgggtacgcttttacagcggacccgctcgaggttttgacaaagcagtaatattcggcccaggtttcatacccggttgcgtcaaagtaaaccgtgagcttctcgctcggcagttttttaacaaaaacataggtttcttccgtcgtcctcgttccgtcggtggcggtcaccttgaccgttactgaggtattcgatttgacgtttttgccaatcacaacgcttgcagagccggtaaaggaaacaggcttgccgccgcttaccgagtaggtaccggactttgcgtcctgcagggaaagcgtaagcgttgcggtttcagaggtaaaattatagttgttcgtataatagccggacgagtttccggtgtaggtcgtcgtgtctgacgtgacctttttgccgttgagggaaacgttcgttaccggtgtcgtattcgttttattgtagataacagcgacggatttcgcgggaacggagcccgtaagctttccgccggaaacggtaaacgtcccgccgcttacctggtccttataagtgccgtttgccatggtggacgcaaagttgatggaagcgttggagccgccgaggttgactactaccatgccggtcgtgccgcgctgtacatagaactggctgccggaagcagtaaccttctccgactggcccgcaaaattgttgcggaactggttgacggcggcaactgttttgtcctgccagagcgtattgcccgggccgcctatcatttcgtcatatttaataaagcccgcgctttcgagctgctcatgctcagggcggcagaaccacagcgaactggaatccttgcgcgcgccgatgatgccccagccgagcagaagctgctggtgagaaagctttgtggaggtgccatcgcagaaattatcgtgggattctacccatgcgacaatgtcttttgcggaagcgccctccgcgctgtagttgacgacgctggagcttgcgttgccggaggtaacggcgcttctgacattcgcgccgagctggctgtcggtcattttgatatatttggaataatcgttcgtcttgcagggccttagtacctcgccgtaaatataagcgtctggcttaatgcccttgatatagcttgtaatattcggccagaaattactcgacgggctgtcggagggcagctcgatatgcttcgcggcatcaaaacggaagccgtccgcgccgttgtcgagacattccttgagtaagcttttgacgtaattctgcacctttgcgcttcccgtattgaggtcgggaaggccgccgagcgacttctgcgtcatatcgctacgtgaattgtcgttcgtattggaattgacgacatgccacgcactcgcatcgaggcgcaaatcgtcgggaatctgtgcattcttcgaataggacgcgccggtatccctctgcgccatatggtttgctacgatgtcgacaatcaccttgactccgtaggatttggcaacctcgcacatttctttaaagtcttcctttgtgccaaggccgttgccgagcgtgaagtcaacaggctggtaatacttccaccagtcaatcatgtaagagccggcgttgtctccgtccgccttaaaggcagtgggctgcacaggagaaacctgtacgctgccgaagccctgcgcggcaatttccttcatatatttggaaatatcggtaaaacgccaggtaaacgcctggaaaatattcccgtcctgtacattggacggaagattgtaagcagcagcgttgcccgcggcagccgcatcttcagatactgacgccccgctttcccccgctgtgtcggttgccgcagcggcagaaaacgacgggattaccaggcaccccatcagcattgccgcagtaagcaggatgcttacaatggctcttctcaatttcatgtccattattcctcctaaaaatttgaaatccgcgtaattatacgcatttaaattataaatcagatacaaattcacttcaataaaacaaaaaggaaataggcatttttataggtcgatttgtaggaatgcctatatacaatgttcttttcttgtcttaattcaacaaacaaaagccaaattgtaatccattacatcgatttttaagttttacaggcaatttttttaccgttattttgaacagaaattgaaaatacaaatttacagtttttacggaaaaagggccgcgcaaaagtgcgcggcccccaagataaacactgttgtttttcggtattcgtcaaaataacgaaaactgtttgagtcagtccaggccggtgtacggcttgactgtacagtcgaagttgccccctgtgccgataggcgtataaagcatattcggttcgtcgagcgcaaggtccatggactggctggtggtattgttgaatatgacgttgttgtacgcgccgtcttcatattcgatggaataaatctgattgcctgctttgttcgttccaacgagctccatcctgacgcccggccattttttgttttccttgccggagccgctcaggtacatgtagcagttaaccctggtccatccgcgtgtgttttcaaaatagaccttggcagctgtgctgggaggcgtaggaagcgggtcatcgacgttcgaccagataccgtatgtcccatcttcgttctggcccgcggtaaataccttgccgtagttttccggctcgacaacgatttcgtccacctggtccttaccgtccggatcgtcgttgttgttaaaaataattgcgttgtactttactggcagtgtgattttgtacagctcatcgcttatcttttccataggatcgcccggccacgataccgccgttcctccaagattttcccagtaataagcgctgacctgcttccaacccttatggttattgaaataaatggtatattctgtgggttcttcagggtctacaacaggctttccaatattataaggaacttccattttagcaaagaatttttgcagccagatgacgtcctggatattgaccgttgcgttcgcgtcgatatcggccgctttctttccatcctcggtgagggtcagaacctttgcgattgctttctgcatggtgatgcagtctgcaacctcaagcctgccgttgccgtcggcgtcgcccagggcgtatttctcgcatgcgtatgcatccggcttaggctcatcagccttgctccagtcgcgccacgcaccgtctgcccaggccattgtaccaatgatttcaaagccgccggcttccctgtttgcgggctccgtcgccggaccgtaatcgagcacggtcgcgggaatcgtcctgccgtcaagtccggtcggtacagggccttcgttgaattttacagtcgcctttgtaacgccggggatttccaccttataatagctcgtaccctgaaccggctccatttgaaggccggggtacggagcaagctccttgccggtttcatcctttgcatagcaccagattccggtgtccccgtcccagctttcattgcctttggcatcaaagtatgccacaaccttggcgttcgggtctttcttaaagaactgataggtttccgtcgtcgtacccgcggcgttcgtcgcggtgaccgtgacaggaacttttgtatcatacgcagcaccggaaccgattgtaatctcctttgtgcctgtgaaggaaaccggcgcagcgccgtttatggaataggtgccgctctgcgcgtcgttgagcgtgagttttaccgccgccgtatcgcccgcaaaatgaagcgcactgtcgccgtcaacggttttgccgccgaactcaaccgccgcagtcggcgttgtaaatgttttgttatagataacggcaacagatttcgccgggacagagcctgtcagcttgccgccggaaacggtgaatttcccgccgctcacctggtcggtataggcgccgttcttcatggttacgcttgtgttgacgctcgctgcgcttgccgcaaggtttacgataaccatgccttccgttccgcgctggacgtagaattggccgccttcagaggttacggcttcgtcctggccctcgaacacgttgcggaacctgttgatttcggcaaccgtcttatcctgccagagcgggtcgccgggccctcccatcagctcgtcgtatgcaatcgtctgcgccccgtttgaaacaccgagcgttccatgctccggacgaaccagataaagtgccgtggagtccttcctcgcgccgatgatgccccagccgagcaaaagctgctggtcggtcagggtattcgtgccgccggaaatgtaattgtcgtgcgattcaatccaggtaacaaggttgtcgggcgtggtggtcgtaatggaatatgtaccaatgttgccggcgtttgtccccttgaccgtgctgcgcacacggttgccgtaggcgctgtcggtcatattgatgtatttcgtatagttttccgtgtccgtgttatacggagaaaggatttcgccgtaaatatacacgtcgggcttgatgctcttcgcgtaattcgtaacattcggccagaaatcgcttgcgaattcaacgccgttgtacgcttcgtccgtaggcagctcgatatgcttcgccgcgtcaaaacggaagccgtccgcgccgaggtcaaggcattcctttaaaaggcccttgacatagctctggaccttttcattgcccgtattgaggtcaggaaggccgcttaaccttctctgggtcatgtaataacggttggcgtcggaaaccgagccgtttacattatgccagcagtcagcgtcgttgcgcaggtcctcgataatatcgggatgccgtttgccgtcgccgccgctgtcggactgcgccatatggttcgatacgatatcgacgataactttaacgccgtattttttcgccgtatcgcacatgttttcaaaatccttttttgtgccgagcacattgccaatctcaaaattgattggctggtagagcgcccaccagtcgcacgcataggacgcgacgttgatggtcggcttagccccctgtacgggcgaaacctgtacgcttgtaaagcccgcgtccgcgatatccttcatgtaacggtcgacatcgttaaaatgccagttgaacgcatgcaggatattgccgtcctgtacattcgacgccaatttgtaggcagccgcgttgtcagcctgtgcagccgtcgtgtcttctgtcggcgccgccgctgacgctgtaggtacaacgatacagcttacaagcatcatgactgcaagaagcacactgattgccgatttcttgaacatcttgataacctccaataaatttttgttgaatttcaacgcatatcattatatactaaatttttttaatattcaataaaaataagcgcattttaaccgatttgtacgattggttaaaatgcgcaaaaaattatatagaagttgtacaaaatcaatttctcaggtatttttatccacctgatgaaatgttttaagattccccgacttattactccttttgtcaagctccgcgagaacctcgtcgacttttatcccttggtcaaccatcaggacagtcaggtggtaaagcaaatcagagatttcaagtaccgtttccttgttgtcgccattctttgcggctatgatggtttcggcgcactcttccccgcatttttttaaaattttatcggtacccttctcgaacaggtagcaggtgtaagagccttcagcaggatgttcctttctttcaacgaccgtattataaaggtcgtaaagcacattttcatacatttgccgttcctcgctttttatgtgtatttcactttaatttcgtgtaaaaacaggagtggttccccgtatggcaggcattgcccgtctgctcgactgtaattaaaagggtgtcgtcgtcgcagtcaccgtaaatatccaacaccttttgcaggtggccggaggtcgcgcccttgttccacagctcctgccttgacctgctgtaaaaccaggtatagccggtctcgaaggtcttctgcatcgattcccggttcatataggccagcatcagcacttcacccgtcgatttttcctggataaccgccggtatcagctcgcttttcttaaaaaatttgtcaaaatcgatttccatgcgtcattctcccagtcttcagtctgcgtcggcccgttttccaacctcaattgccgcgcgcaggtcgaggtcgcccgtatatacggccttgccagcgatggcgccgtaaatatcgagctcagcaaggttgataatatccttcaggttaccgacgccgccgctcgcgataatatcgcaggaaacggcagttttcagctcgtcgagctggttcaggtttgggcctgaaagcattccgtcctttgaaatgtcggtaaaaataattttgcttactccgatgtcctccatgcgctttgcaagctcaatgaagccaacctccgcgtcgtccgtccagccctccgcgcggacaataccgtccttcgcgtcaatgcctacggcaacacgctcgccgtatttttttacggcctccttgacaaacgccgggttttttaccgccgcggagcctaaaatcacgcggtcaatcccatttttcaggtaaaattccacggcatccaaatcgcggatgccgccgccgacttcaattttcatcgttacagccccgcgaaccccgagtatggtttcttcattgacgcgtttgccgtccttcgcgccgtcgaggtctaccatgtggagccaggacgccccctgattataaaaatcccgcgccgcggcggtcgggtcttccgcaaccttgtgcgctgtggcatagtcgcccatcatcagccgaacgcagctaccgtcttttatgtcgattgcaggtatgacgatcataatacattcctcccaaatctattctataaacaggcgccgcccaattgccgcatgacggcgccgcgcgttttgttcgttttcattgtttcagtcgagaagcccctttgttgaaagggacgtaccttccagagttttgcgcgtggcaatttgcagcgcgtgcgcggccgccttgaacacggcttccgcgatgtggtggctgttcttgccgtatggcgctttgatgtgaagcgtaatccccgcgtgaaaggcaagcgcgcggaaaaactcttccgtcatgcaaaaatcataattgccggagctttcctgcggaaaatgggcgtcgaaaacgagaaacggccttccgcttacatcggccgaggcaaagccgagcgcctcatccatcgggacaaaaaaagtgccatagcgcgcaattcccgatttgtccccaagcgcttgagaaaacgccttgcccaaaacgataccggcatcctccaccgtatggtggcagtcgacgtctaaatcgcccttgcatttgaccgtaaggccgaaaccgccgtgcacggcaaaggcagtcagcatatggtcgaaaaagccgacgcccgtttcaatggaaacggcgccgccgtcgaggttcagcgctgcaaaaatttcagtttcctttgttttccgctcaatgcttgcgttgcgcacggttaagcccccttaacttgtttgaatcgatttataacgcctgtccggtaaaatatgcccggagcgttttgataaacgtctcgttttcttcccttgtaccggctgttatgcgcaggtaaccgcccatcaggcggacggctatgccgttttgcaggagatattcaaatatatccttagagagcggcgttttgacaaacacaaaatttgtgcttccgtcgataagcgagagcttctctggaaaatcctgtacaagccccgcaaggctattatacagggcttttcgcagggatacaatcgtttttttcacattcgacaaataatccctgtttttgtaaagaaccgcgcccgccgcctgggaaaacgcgtttacgttatagggcgatttcaccgccttgagcgcgcgtgtaatgacagggttcgataccgcaaagcccagccgcagcgccgcggcacccaccgccttagacgcggtgcgcaggattaacaggttatcgtatgcgttaacttcatggagcagggactgctcccagaaatccatgtacgcctcgtcgagcacaacgagcgcatccgtacccttgagaagccttcgcacctcgtcaaaacaaagcgccttggaggtcgggttacaggggtttgaaaagataacggcccgcgcgcccgttttctgcacggtacggaggacctcatccacatcgattgtaaggctgtcggccttttgcacctgaatacagtgaacttcggatagggatgcgtaaaaacggtacatagaaaaatcgggctcgaccgtgacaagcgtgtcgcccttcattaaaaaagcgttcatgatgatggaaatcagctcgtcggagccgttgcccgccgtaacacaggccgcgtcaatgccgtagtagcccgcaaaggccgcgcacagctcctgcgcgttcgggtcggggtaacggttgaaatcaagggaatccagcgcaaggtggagctgctccatcaaatcagccggaaggttaaagcaggattcattcgcatcgagccggattttatacgtgccggaaattggctcatacggtacaagcccgctgattttctcatttagtgtatacatgggaatccgcccttcttatttcataccaaaacgcaccttgacggagtttgcatgggcagtcaggccctccgtgtccgcaagtgtgacgatatcccgcgccgcttccctgagcgcgctttccgtatagtaaataaagcttgattttttaataaagctgtcaaccgacagcggcgagaagaagcgcgcggtaccggaggttggcagcacatggttcggacccgcaaaatagtcgccgagcggttcaggcgaatagtgccccaggaatacagagcccgcgttgtcgagcctgccgatatactccatcgggttttccgtgcagacctccaagtgctcgggagcaagctcgtttgcaaagtccacggcatcgtcaaggcttttgcagacgataaccgcgccatagccgagcagggacttttcaatgatttctttcctggaaagtctttgtacctgctttgtaagctcttccctgaccgcaattgcgagctgctcgcagtcggtgagcaggatagcggaggcgagcacgtcgtgctccgcctgggacatcaaatccgccgccaaaaacgcggggactgccgttttgtccgcaacgattaaaatctcgctgggccccgcaatcatatcgatatctaccgtgccgtacaaaagctttttcgccgttgcgacaaaaatattgccgggaccgacgattttatcgaccttcggcacggtttcggtgccgtaagcaagcgccgcgacagcctgcgcgccgcccatcataaatacgcggtctacgcccgctgcctttgccgccgccataatgtcggggttcggcctgccgtccttctgcggcggcgtaaccatgacaatctcttccacgccggcaatcttcgcggggatggcgttcatgagcacggaagacggatacgccgccgtgccgcccggcacgtaaatgccgacacgtttcagcccccgtaccctctgccccatcattacgccgtccggctttgctgtaagccagctctgctggagctggcgctgatggaagtccctgatattcacgcacgccttctctaccgcctgtaaaaaagcggggctgcattttgcagcgagcgtgtcgatttcatcttttgatatttcggtgtgctcaggcgctttgccgtcgaacttttccgtatatgcccgtacggccctatcgccgttttggcgcacatcctcaataattttggcgactgctgccgttacatcgcggtcgttgctttcgcagcgggccttgagctcgtttataaactgccgctcggctgttccgtctgcttttacgattggtatcatttgatcagcccttttctgtaattgcccgttccattttctctaccagcgcttcaatctcgcgctttctaagctttaagcttgcgttgtttgcaatcagccttgccgatacaggggtaatgtcttctatgatctccagcccattttccctgagcgtcgagcctgtctctacaatatcgacgattgcgtctgaaagcccgagcaggggcgccagctccacactgccctctattttaatgaaacggatgtccatgcccttgttttcaaagtaattgcgcgcgacgttcgggtatttggtggcaattgtcttggaattgtagcccgagaagaaatcgcagccccttttgccagcgagcgcgaaccggcattttccaaagcccaaatcgagcagctcaaaaaacgccgtgccgttttctaaaatcgtgtccttgccgacgacgcccaaatcgcagacgccgtgctccacatatgtaataacgtcggccgcttttgcaagcaccgcctcgatttcgccgtttccaacaggaaggatgagccttctccccttattgcgcaaagcgccgcagtcgtagccgagctgctccagcagcgcgactgtgtccttttccagacgccccttcgtcagcgcgattctaagtggtttcataatgattgtctcccgtcctttgcaggtatgttataaatcgattgtttcatgctcttcgttgacaaagcaaacctttgtaattgagcgctgcctggcgtaggaaagcgcctcttcccgcgtggtataaacgctgtattcgcaggtaagtccgctcagggtatagaaacgcgattggctgattgcctccatctcgtatccatcgtccgcgtggacgagcacgtcgggcgccttgctttgttccaccgcgcccttttgaagcaaaattttcgacagcgcgtccacgttgataccaaagcccgccgcgggcataggcatgtcaaacgtgtcgaacagcttatcgtaacggccgccgatgagcaccgcgtccccgctgccctccacatagccgctgaacaccatgtcgctgtaatagtcgtttcgctggacaaggcccaaatcgataatcagccggtcgcccatacacaggtgtgaaaggctgtggtaaagctcctttaaatcgcaaagcgcctgctgtgcctgcgtaccctcgaacagctcggaggcttcggacaatatctcctctcctccaaacaaacgcggaaggcgccggatagccgcaaccgtgctcgtctgctccaggccgtccagaatcgtgtcgagcgcggaatagtttttcgattcgatagacaggcggatttcctcccgcacgatatcgctgaccggaagctgctgcgcgagagatttgaaaaagcccgcgtgccccagctcaatgcggaagtcaggcacaatcttctgcagcgcttcgacagccgtgacgataacctccaaatcggcgcgttttccgcccgcacctatcagctcaattcccgcctggcgcacctcgttgctgcgcccggttagcgcagggttgttgcggtataccgtttggttataataaagccgtatggggcgcgtttccttttgcaggcgggtcgccgccatgcgcgcaatcgggacggtcaaatcgggccgcagcaccaaaagccttcccttgttgtcgctgagcttatacatatcttcctgctggatgccgctgctgccgcgcgtaaacgcgtcaaaaaactcaagccccggggtcagcgcctcgtggtagcccttggagcggaacacatccgtaataatccggcttaccttattgatagcggtacattcctcaaataagtaatcacgtgtaccctccggcgtaattttataataattcttcatattatccctctttaacttacagcaggcaagctcttttctccccgcctcactttagcgtgctaatataataacacggtaaaatcctcttgtcaacaagaaaacagggcaccgcgcgccctgttttctatgaatcttctacaaaaccggaaataccggcactattttttctttttattaaagttgaatttcgttttgactcgtatgaccctgctcttgtctttattaaagcgcgggtccttgggcattttttgctgaatgatatcggtattcggcgggtcggaaaattcctgcgcgtgcccgttctttacaagacggcggttgaccgccctgccgagcaaaacataaaacgtggagaacagcggtacggcaagcagcataccaaagaagccgaacaggccgccgcctatgataacgctcgccataatccagaagccggaaatgccgatggagttgcctaaaatcttggggcctatcaggttgccgtctatctgctggagaatcaggataaagacggtgaaccagacggcttcgatcgggtcaatcatcagcataataaatatgctggggattgcgccgataaacgggccgaacacggggattacgttcgtcacgccgataatcacactgataagcggcgggtaatcgaacccgcagatagacatgacgatgaaacagagcacaccgataatcagggagtcgagtattttgccgtaaacgaatttgccgaaaatattgttcgataaatcgccgatttccatgaccttcggtacaatccttttcggcaggtaagcgtagcagagctttttcgtctggaaaataagcttatccttgcagcccataaaatagacggatacgatgatgcccatgcccaggtttattacagaggtggtgaagttctttgtgatatcgaatacgctcggcgcgattgaggacgccaggttcttcagcagggtattgagctccccgcccgtaacggttttcaccaagctgttgataaaattcatgatgtcgctgtcgttgtcgagcttgatgccaaagttgttgcccaggaaatcggtcaaaaactgctggaagctctgggcgtacccggagaaattcttgacgagctggttgacgctgtctgtaagctgcggaatcaggataaccaccaaaaaggcaattacgccgaacacaatgatatacgccgtgaccagcgccagcggctttctcatttttttgagaaacctgcccctgttgtctagccccttgtacgctttgtcggcaaaaaacacatacggcatattaatcaggtacgcgatgataaagccgacgaaaaatggcatgacgacattgatgactagccctaacagcccccaaacaacaccgaaattgagcatgacgaacagcagtatgaccgtgaaggcgataagcccgaggtagcttttaaatttttttggttccaagctttttcctccttttcaaagggagtctttttatatgtgaatcagaacagagacatctggctgctttccggcagcccttccagcgcgccgaccgcccccagtgtttctatgactgatttggatacctttgtacgaagctgcaaatcctcgatggagaggtattctcccttttgcccgccagcctcgaggctttccgccgcggcgtcgccgacgcccggcatggaagaaaacggcaggcggatttttccgtcctcaagcctgaacatcttcgctttcgacttatatatgtcgataggcagcacctctatgccgcgcgcgagcatttcgttgatgatttgcagcgcggcgtattccgcgttgtccttggcggtcgcctcatagcccttctgcttaatcatcgtcatcttctgtacgacggaatcctttccgccaagcacggtcgccgcgtcaaaaccttcgccgcgcaccgtaaagtaagcagcgtaatattctgccggacggtgcaccttgtaccagccgagccggagcgtggaaatcatgtaggccgccgcgtgcgctttggggaacatgtacttgattttcatacaggaatcaatataccatggcggcacattatgctccttcatcgcgtttatatgctcctctgtcagcagctttgtcgccttgcctttacggacaatttccattatcttaaacgccatcttaggctcgagccctttatgcagcaggtatgtcatgatgctgtcgcgcgtaccgataacctctgcgattgtgcaggtgcctttcttgattaagtcggcggcgtttcctatccagacgtccgtgccgtgcgacaatccggaaatctgaagcaggtccgaaaaggttttgggctgggattcgatgagcatctggcggacgaagctcgtaccgacctccggcagggagaacgttcccgtctgggaatcgatatccgagggctccacgccgagcgccttggtggaggtaaacagggacatgacgtccgggtcactcatggatacctccataacggaaacgcccgtgaattcctccaggtaatgatagatggtcggcacatcatggccgagctcatcgagcttacatattgtatcatgaattgagtggaaatcaaagtgtgtcgtgatattatctgatttctggtcgttcgccggatgctggacggggcagaaatcgtaaacctccatccccttcgggacgacaaccatgccgcccgggtgctggcccgtcgtgcgcttgactccggtacagccctccgctaaacgcagctcctcggctttgtttaaaatcatacccttttcctcggcgtacttcttgacaaagccaacggccgtcttgtcggcgacggttgcgatggtacccgccttgaaaacgttatccttgccgaacagctcttccgtgtaacggtgggagaaggattggtactcgccgctgaaattcaagtcgatatcaggcgttttgtcgccctcgaaccccaaaaacgtttcgaacgggatttcatgcccgtcgcgctccatttccgcaccgcattcagggcacgctttcggcggcagatcaaagccggaaccgtagctgccgtctgtaataaattcgctgtgcttgcatttggagcagatataatgcgggcagagggggtttacctccgatatgccggacatcgtcgcgacgaacgacgagccgacgctgccgcgcgagccgacgaggtagccgtgcgcctcgctgtccgccacgagcttctgcgccgtcatgtacaatacggagaagccgtatttcgtgatggagcccagctccctgtcgagcctgtcttttacaatctgcggaagcgggtcgccgtacttttccttcgcgcgcttccaggtaatatcgataagctgttcctgcgcgccctctatgaacggcgggaacacgcccttggggatggggcggaccggctcaatcatatcggcgattttattcgtattttcgacgacgacctcgtatgccttctcttccccaagatatttaaattcttccagcatttccgccgtggtgcgcaggtatagcggcggctggttgtcggcgtcggtaaagccctgccccgccatgaggattttgcggtagtcgctgtcctgcgggtccataaaatgcacgtcgcaggtggcgacgaccggcttattaagctcgtcgccgagctttacaatcattttattgaactcctcaagctcctgcaccgattttaccgtgccgttgtggagcatgaacatattgttgccaatcggctggatttccagatagtcgtagaaggaggcgatttccttaagctccccccacggcttgcccgcgacaatcgcgcggaacagctcgcccgcctcgcaggcgctgccgataagcagtccttcacggtgcttgataagctccgttttggggatacgcggtttcttgtaaaaataattgagatgcgccatggaaaccagcttatagaggtttttcagccccgcctggttcttgacgaggataatctggtggtatggggcgagcttgcggaaatctgcgccgttgattttagtattgatctcctgcacggactttaaaccataatcttccttcaggcgcatgagcaggttcaaaaagatttttgaaagcatttccgcgtcgtcgcacgccctgtggtggttgaattccccaaggcgcatatattttgctaccgtatccagcttgacgtttttaatatccttcaaaattgcgcggcagattgcgaccgtgtcgatggaggtgaatttgttctccatgccgcagcgctccgccgctgcgccgataaagcccatatcgaacggcgcgttgtgcgcaacgagcaccgcgtcggccccgccgcagaaatcataaaaatccttgagcgcccgggcttccttaggcgcgtcctttaccatatcgtcggtaatgcccgtaagctgggtgattttcgccggaatgggcataccggggtttacaaacgtgttgaaggtatcggtaatctcgccgtttttgatttttacggcgccgatttccgtcatcctgtccttttttgcgctcaggcccgtggtttcggtatcgaagcagacaaactcgccgtcgaacggcatatcccgttttccttcgagcgaggaaatcatatcgttgatgaaataggcctccgtaccgtaaatgaccttcatgtgctcgttgtcccggttgatggcttcaatcgtatccatcgcctccgggaaggcctgcgcgacgccgtggtcggtaatcgcgatggccggatgcccccatttatcggcgcgattgatgagcgacgacgcagaggttaccgcgtccatggaggacatgttcgtatgcaggtgcagctccacgcgctttttcggcgcgttgtctaccacctgtattttggaaacggtgctgatgctgcgcgcgcgcacgcagaggtccttatcataccggtcgtattcaagctcgccgcgcgcaaggatggtggagccctttttcagcgaatcgagcaccctgcagttttttatctcatctataattttcaggttcatggaaccggtgtagtctgtaataccgatggaaataatgtttttgctgccgtcgcgcgtggtgcgcttatccatcaggaaaatatcgccccagatgacgaccttgcccgtatccggcgcaagcgttttgatgggcatggttttgcccttgatgacgctgccataaaggggctttaccgtctgcggcaggatttgcggatataggtattcgtccctgcggatttcaatcgtctgcgccgcgttttgcctgcgctgctgcttgctttcgattgcctcttccatagaggattcgtagtcctctatttccatcacggccttttccctgcgctgtttttcctgcacgttctgctgcttttctatgtacgcgctcgaatcggcgtcgattgacagcacgccgtcgaactccacctggaagctctgtccgaattccttttcaatcagcttttgcagctcccggtcaaagcccttgctctttaaaatcgcggcgccgccgtgctttaaattgacagtcagtacgctgccgtttaccgtgcagccagaatccgcgaccgtgccgttcaggcttggaatgagccgtttgagctggagcaccaggtccgggtaatattccggtgtaaaagcgccccgcgggaacgttgggtggatatgtacgatttgaagcgccaggtcggatttttgcagcgcgcgctccgcgtcgaacagcacgccgcgcccaaccggctgggggaattcagtatggatatccataatccgcttttgtgaattgatattgacactgcgcacctcgccgtcgagcactacgggcggcagctcttttcctttaaaatagcctgaaaacaggtcgttaaatgtactcaaaaattatccctcttcatcctgtatctgaacaaatcaatgtattttttcgacttcccttatcagctcgtctatcagcctgtcctccgggaccctgcggatgatttctccctttttaaaaatcagtcccacaccgtcgccgcccgcgatgccgacgtcggcttccctggcttctccaggcccgttgaccgcgcagcccataatcgcgaccttcaaatgcttacggcagccgctcaaacgattttccgcctcgtttgcaaggcggattaagtcaattttcgtcctgccgcacgttgggcaggaaataaactggatgccctcatccgataaatcgagcgctttgagtaaatccttcgccgcttcgacctccttcagcgggtctgccgtcaaagagacgcggatggtgtcccctatgccgtgaagcagaagcgagccgatgcccgcggcggattttataatacccatgcgctcggtaccggcctccgtcacgccgaggtgaagcgggtaggaacagcgttcgtgggcaagctcgtaggcctcgaccatcgttttgacacacgatgatttcatggaaaggacaatgtccgtaaaatcaaatttttcaagcagggacgcatggtaaagcgcgctgtcgcacaaagcttcagcggtcggcgcgccgtgttttttcaaaatatgtttttccagcgaacctgaattcaccccgatgcggatggggatgccattctgcctgcacgcgtcagcgactgcttttacgcggctttcatccccgatattgccggggttgatgcgtattttatcgacgcccgccgaaacacaggcaagcgcgatacggtaatcgaagtggatatccgcgacaaccggcgccttcaccgcttttttaagcgcgggaatcagcgcggcggccttcatattgggaacggcggcgcggatgatgccgcatcccgcctgttcaagcgcgattgcctgccgtacgctgccttctatatcatgggcaggcacgctcagcatcgactgtacgctgaccttcgcgccgccgccgattgtaacgttccccgcttttaccatttttgtctgtttcatcttataatcctttcgctatcccagcccgctgccagtaaagaggcggacaatatcgctgaaggcgacaacgaccataaacaccatcaaaagcgcaaacccaacgccgtggacgatgccctcatattttgcgggaaccggcttcctgcggatgccctcgattatcaggaaaatcagcctgccgccgtcgagcgccgggattggaagcatattgacgatgccgaggtttactgtgataagcatcataacgcttaaaatgttattgaacgcgctcaggaagtttatctgcaggccggcggacgctacgtccgaaatggctgaaacgatgccgataggccctgaaagcgcgttaaagccgaaccttcctgtgattaagccaatcaggctgtaccaggtgatgcgcaccacggaaaccgtctgttcccatgtttgctggagcacgctcaggaaggtgcgttcctgcggtacgacgtaaaaatcgagcaccagggttttattgccttccttgtcggttcttgtggcgaatttcatttcgcccaggtcgattgtctccccatttctttctaccacgacatccgctttataattctgtaccgttgcaagcgcaaaggtaatatcacgcgaattataaatgtcataaccatcaatcgatacaaaacggtcgccctctctgaggccgttttcctgtgtaacggagttctcagggaaagcgtctatcgttgtcgtcgcatacatgggctgctgtactacgataatgagcatcatcaaaaggccgagcacaatattcataaacgcgcccgcgcatacgatgatgatacgcttccacaccggcttgttgccgaacgccttcgggtcctcgctctgctcgtcctcgccctccatggcgcagtagccgccgatgggcagcaggcggagcgaataggtcgtctccccttttgtaaactggaagagtttcggccccatgccgagcgcgaattcgttgacgcgcacgccagaaagctttgccgcgataaaatggccgccctcatggcagaaaataattaactcaaacagcaggatgccgataataatcaatgctgcgacttctatgacaatcaaatcctttcaatacgccggcttaggttgcgtggcgcaggacaaactcccttgcagacttgtctgcttctattatgtcctgtatacaggttatttctccgccgggctgattattcattgccgcatctgtaagctgcccaatttcaagaaaagaaattttttcttttaaaaacagggagaccgcttcctcatttgccccgtttgctgccgcgggagcaagcccgcccctgcgtatggccttcctgcatacctccatacaggaaaacgtgacggaatccggttcataaaacgtaagccttcccgcctgcgcaaggctgagccttttaaccggtgattccactctttccggataggtcagcgcgtattggatgggaatgcgcatatctggcacgcccagctgcgcgatgacggaattgtcctgatactcaaccagggaatgcacgatgctctccctgtggacgaccacgtcgattctgtcctccggcagcccaaacagccaggaggcctcgataatctcaagccccttgttcatcatggtcgcggaatctatcgtaattttcgcgcccatactccaatttgggtgcttaagcgcctctttcggcgttatattttgaagcccctcacgcgtcctgccgaaaaacggcccgcccgacgcggtcaggatgatacgcgagagcgccttaccatccgggcagccctgtaagcactggaaaacagcggaatgctcgctgtccaccgggtaaaggcttacgtggttttcccttaccgcttccattacgagcgagccgcccgcgacgagcgtttccttattggcaagcgcaatattttttttcgcgccagccgccgcaagcgtaggggcaagccccaccatgccgacgacggaatttaaaacggtatcggcctgttcaatagaagccgcctcgcagagcccttccatcccgcataataccttcacgcttgtatcggctaaggaaattttaaggctctttgccgcctgctcatcaaaaaggacggcaaggcgcgggcggaatctgcgcgcctgctgttcgagcagtgacgcgttgctgtgcgcggtgagcgcttctatggagataccgagcttttcggcgacatcgagcgtttgtgtgccgatggagccggtcgagccgagcacggataggtttttggtcattttatcaccttatcgaaagggcggtcaggcgaccgtcaaaatcggaaaatactggacgaatacgagaagcaggggcgccgcgaatatgacgctgtcgcaccggtcgagaatcccgccgtgccctgggataacgttgccgtaatccttgacgtggcagctgcgcttgatgatggaaaagcacaaatccccgacgattgaaacgagcgcgccgagcagcgctacgatgatgaggtttacataatggatttcctcccggccggactgcgtgtaaaacaaaagctggaatacgagcgcgtctacggctgctccgattataccaaaaaccacgccgccgaccgcgccctccaccgtctttttggggctgatgttcgggcaaagcttatgcttgccgaaaaacgtacccataaaatatgcgccggcgtcggccacccatgggatgacgagcgacatcgtaacgtaaaaacccgtgtgcgtcctgttctggtcgcacaggatgataatgctgcccattcccagcaggacgagcgccgtcgtggaaaaggtgaacgcaacgtccgcaaacgggatttcatcgtgccagaaaatcaacacggcgaacatcgctaaaacaaacaaatatgtaaggattggccaccacacgctcgatagcaggatgggaaaaagcaccgcgaacaccatagggggaacggagagctttaagtttttgataacgccccttgcggtgagaagctcgattacgcagacgagcgccgcgagggataccataatattaattaatatagggaacattttattgagcgcaagcgcaaccacgagtaaaagcgaacccaaaacgccggaaatgattctcaatttcataagaaagccctgcctttaaatcttattaataggagaccgttttaaacgccgccgaagcgcctgctgcgctttgcgtattcaatcagagcctgatccagcattttttttgtaaagtccggccacagaacgtcgtctaaaattacatattcggcataggccgactgccaaagcaaaaaattggaaatcctgtattccccgctcggccggatgataaggtcggggtccggctgccccgcggtatagagatggccggataccatctgtacatcgattttatcaatatcagtcgagccgtttttcacttcaagcgctatctgcttgaccgcacggatgatttcgtcccgcccgccgtaattcatggcaaggttgagcaccatgccggtgcggtgggcggagcattcctcgttttctttgatgagcgcctgcaaatcaggcgaaaaggctgatttatcgccgataaaccggacgacgatatcctcgtccttgaagtcgcgcagcgcttcttccagataggatttgaagaggttcatcaaagaatcgacttcttccttcgggcgtttccagttttccgtggaaaacgcatagatggtcaggtatttgatgccgatggagctgcagtatttggtaatcgttcgaaaattctgcgcgccggccgagtgtcccgcgctgcgtgggaggcctcttttctttgcccagcgcccgttgccgtccataataatgccgacatgcctgggcagtgtgatatcggaaagggtgagctccctatcgccggaaccattcttttttaaaaaaccaaacgccattacgccaccgccgctttaaaattccgggcgctaccggcagcattgtccatactgcccggtatccgcccgttttacaagtgatggcgggaatgcgccgcactcccgccgaaccggtatttctactaagagcttatgaagggggactatatctccatgacttctttttcttttttctccaccattttatcggtttcctttacaaaacggtcagtaaggtcctgtaccttcttttcgacctgcttgagttcgtcctcggtaagcgcgccgtccttcttcatcgccttgcccttttcaatgctttcccggcggacattgcgcagggaaatctttgtttcctccgccattttacggatatccttgacaagctccttacgcctgtcctcagtaagcggcgggaacatgatgcgaagggttttcccgtctgtctgcgggttgatgccgaggtcggacgtctggattgccttttcaatcgggtggatgacagacgcgtcccaaggctggatggtaagcgtgcgcgcctctgtaacggatacggcggcaagctggttaatcggcgtgggcgttccgtagtaatcgaccataatcttatcgaggacggcggggtttgccctgcctgccctgaccgcggcgaaatcgcccgccaggtggtcaatgcgcttctgcatgcggctttccgccttttgtaacaattctttcatgatgctctcctccgaatttctcaatctggatttttagcttttgttattattcgaccagggtaccgatatcttccccgcagacggcggcgacgatattctccggctgttcaatactgaaaacaaggattgggatgttgttgtctttgcaaagcgaggccgccgtggaatccatcacgcccaggtctttattgaggacgtcgaggaaggaaacggtgtcgtactttttggcctccgggtttttcttggggtcgctgtcgtatacgccgtctaccatcgtagctttgaagatgatgtccgcgtcgatttccgccgcgcgcagggacgctgccgtatcggtggaaaagaacgggttgcccgtgccgcagccaaaaacgacgacgcggcccttttccagatggcgtaccgccttgttgcggatataaggctccgcaacctgctgcatggtgattgcagtctgtacgcggacaacggcaccgagctgttcgagggcgtccgcgacgccaagcgcgttgataacggtcgcgagcatacccatgtggtctgcgcgcgtcctgtccatgttgccgctgctgcggcccctccagaagttgccgccgcctacgacgattgcaacctccacgcccatatcgacaagcgttttaatcggagcgcagattttcagcaccgtgtcgaaatcgataccgtgcgcctgcccgccggcgagcgactcgccgctgagcttcaaaagaatccttttatacttgggttccatacatttcaagtcctttccgcatagcaagggtaattgtaataggtgaaacggttcagattatcagattaataatactatatcttgtgttccgtgtaaagtaaaagaaagaagaatttaccgttgattcaaacttttttcacagaaattcaccgcgaaaagcgccgttttttccaaaacgaatgaattggcggcatgaaaaaacgggacggtaaaaaccgccccgtttgaggtcaaaccattatttaaagaaagcaaacgcgttgaggccgataacgagaagcacgaagcccgccgcgaaaaccttcgtccagcgtgccagaaacgtgtcgatggaacgggccttattcttggagaagaatgtgtccgcgccgccggtaacaacgccaatgccctgctggtggccttcctgaaggatgatgacgataacgattgcgatagagaataacagcattacgccgcccataacgtattcccaaatgctcatgatggagtacctgccctttctaaaagcgcgcatatgcgccgctgaattttgatatcatacataaatagccagataataataccatacacatttattttttgcaagcctttttcatgcattttttcttttttcccgcatgatttttacaaaatagtcagctgggacgcgccgctgtcctctggaagcggcaacgcgccgagcgcgggaaggcttttcatgcggtaacggttcggcttttggaaggtcccctctgcgtagggcctgatacccatcaggcggtgtcccttcttcatcgtcataaccgctacgccctgcgtgctcctggtagattttaggctcagcgcgccgctgtggagcagcagcatcctgccgcttgaagaggtgagcaggaactccccgtcctccagcgcgaagacgcagcttacgagcggcgatttgtcgctgtaggcgtttgcgagctttttgcggttggtttttgtcgcatatgcctcgagcggcaccttggcgaccttgccgttttcaaaagcgaacagcagaatgccgttgtagtctttcgtcatgaccatataaacggccgtttccccctcgtccataccgagccgcgccgggatatattcacccaaaacgctcgctttggtatcgggaaaatctgacgccttcgccttataaacctggcatttgttcgtaaagaacagcaaatcgcaggcgttcgtcgcctccaccgtctgcgtgatttcgtcctcaggcttcagcttttgctccccgctcatgcgcagggacaagggcgtaatctttttaaaatagccttcctttgtaaagaaaagattgaccggataatcggggatttcctcctcgagctgtacgtcctcaatctcatcgggataaatcaggatgcttttcctgggctgcccgtatttttccgcgacttctttcaattcgtttatgatgatagtcttgacgcgcgtcttgcttgcgagaatggcttccagctcttctatgtccttttccagcgtctcgatttcctgcgtgcgctttaaaatgtattccctgttgaggtggcgcagcttaatctccgcgacgtattccgcctggatttcgtctatgccgaagcctatcatcaggttggggacgacctcgtcctcctccgccgtttcacgcacgatgcgcacggccttgtcgatatcgagcaaaataagcttgagcccgcttaacagatgcagcttgtccttctttttgcttaaatcaaagtgggtgcggcgcctgacgcattccacgcggaaggccgtccattcgtccaagagctcccgcacgcccagcacgcgcggcacgccggcaataaggacgttgaagttacaggcaaagctgtcttcgagcggcgtcattttatacaggcgctgcataagcctgtcggggtctgcgccgcgctttaaatcgattgtaattttcaggccgtctaaacccgtttcgtcgcgtacgtcggctatttccttgattttgcccgcttttacgatatcgataatcttttcaatgatagcctcgcaggtggtcgttggcgcaatgccgaggatgtcgatgcagtttgccgatttatcgtaggcgtagcgggcgcgcaccttgaagctgcccctgcccgttttgtaaatctggccgaacgtctctttggaatagacgatttggccgccgcccgtaaaatcgggcgcgggaagcgtggaggaaatgtcgtgctgcgggtcgcggatgagcgctatcgcggtttcacaaacctctttcaagttaaaggaacagatggagcttgccattccgacggcgatgccggtgtttgcgtttaccagcacggacgggtaagacgcgggcagaagcgtcggctctcttaaggtattgtcgtaattgtccacaaaatcgatggtatccttgtcgatgtcgcggaacagctccccgcagatggggtcgagcttcgcctcggtatatctcgacgcggcccacgccatgtccctgctgtagaacttgccgaaattgccctttgaatcgacatacgggtgcaaaagcgcctcgtagccgcggctgaggcgcaccatggtgtcataaatagcctggtcgccgtgcgggtttaatttcatcgtctgcccgacgatatttgcggattttgtgcgcgcgcccgtgagcagacccattttgtacatggtatacagcagcttgcggtggcttggcttgaagccgtcgatttccgggatggccctggacaaaataacgctcatcgcgtagggcatgtagttgagctcaagcgtatttgcgattttctgttcgacgaccatgcccgctccttcgattacgccgtgcgtcttttgcaccggcgggcgtttgggcgcggatttcttttttcttggcgccatattctcattcactccgtatcttctgttaacttcttacaggaaagcaataaacggtatcatttcagcttacgtcgaggtcgtcgatataattgctgccgttttcaatgatgaattcctttctccccgcgaggttgtcgccgagcaggatatcgaacatccgcgccgtttgctccgcctcgtccggcatgaccttaatcaggcggcgggtagagggattcatggtggtgaggttcatcatgtcgggttcgttttcgccgaggccctttgaacgctgtatggtaaacttcatattcccgatttctttcaggaacttttctttttccgcctcggtataggcaaaataaatttcgcttttcgtcgtaatttcatacagcggcgattccgcgataaacacctttcccatctcgatgagcgtgggcgtcaggcggtaaagcatggtaagcagcagcgtcctgatttggaagccgtcgacgtcggcgtcggtacaaaggatgattttgctccagcgcagcaggttcaaatcaaaggaggaaagatccttgttcgccctggatttgacctctactccgcagccgagcaccttgattaaatcggtgataatatcgcttttaaaaattttatcatagtcggccttcaggcagttcaatattttgccgcggattgggataatcgcctgaaagtccgggtcgcgcgcctgcttgcacgcgcctaaagccgaatcgccctccacgatgaaaagctcgcgctcgtttacgtcgcggctgcggcagtctacgaacttcggcaccctgccggtcatgtccatggtacccgtaagctttttcttcaggtttaaacgtgttttttccgcgtcctcacggctgcgcttgttgattaatacctgattgccgattttttccgcctcgatggggttttctataaaataaatttcaagctggtggcgcaggacctccgtcatcgcgtcctggatgcctttattcgtgatggcctttttcgtctggttttcgtaagaggtaacgctcgaaaaagatgaaataacgatgacaaggcagtcctccacatctgtgaagttgattttgctttcgtttttcgtatatttgttattttgcttcaggtatgaatcaatctggtagacgaaggcgtttttgaccgccttttccggcgcgccgccgtattcgagccagcttgaattgtggtaatattccgcaagctttaccttattggaaaacgcgagcgcaaagttcattttcactttatattccggcttgtcggcgcggtcgcgcaccatgcgctccgcctgccaggactggatggacgaaaggccctcatccccgacgatttcacgcacgtggtcggtaatgccttccctgtactggaactctgtcatttcaaacgtttttccggcctgattgcggaatatgaacgtaacgcccgcgtttacaatcgcctggcgcttgataacgtcgatataatactgcggggaaacgtcgatatcggtaaaaacggaaaggtcgggcttccagcggatttttgtgccggtgtcctttttgccgtacggctcctttttcagccccccgacgttctcgcccttttcaaagtgaagcaaatagcggtagccgtcacgccggatgtcaacgtccatatattcggaggaatactgcgtcgagcacaagccaaggccgtttaatccaagggaaaactcgtagctttcgccctcgttgttgttgtatttgccgcccgcgtaaagctcgcagaatacaagctcccagttaaagcatttctcattgttgttgtaatcgacgggaattcccctgccgtggtcctccacctcaatggaacaatccgcgtagcgcgtgatggagatggccttgccgtagccctcacgcgcttcatcgatggagttcgagagaatttcaaaaatggaatgctggcagccctcaataccatcggagccgaaaataaccgccggccttttcctgacgcggtcggcgcccttgagtgaggaaatactgtcgtttccgtactcctgctttgccttgcttcttgccataacgtcctatcctttccatcaaaccaatctaaattgccaaacgcagaataaaacggcgtacgccgttttattctccctttagttttttaattttatcgcgcaggtatgccgcgtgctcaaattcaaggagcttcgcggccgccctcatttccttggtgagcgattctatcatctgctgtttttctatttttgtcaaatactttttcggttttttgctgtcgtccttatggcttgagatttcgaggatttccgaaacctgcttgatgatggtcttcggcgtaatgccgtgctgcctgttgtattcgtcctgaataccgcggcggcgcagcgtttcacggatggcgttttccatcgaaggtgtgaccgtatccgcatacataatgacctcgccctgcgcgtttcgtgccgcgcgccctatggtctggataagcgaacgttcgctccttaagaacccttccttgtccgcgtcgagaatcgcaacgagcgaaacctcggggatatcgagcccctcgcgcagcaggttgataccgacgagcacgtcgaattcccctaaacgcaggtcgcggataatctccatacgctctaccgtgtcgatatcgtggtgcatgtagcgcacgcggatacccatcgtttcaaaataagaggttaaatcctccgccatcttttttgtaagcgttgttacgagcacgcgctccctgcgcgcggtgcgtatattgatttctgaaatcaaatcgtccatctggccctgcgtagggcgtacggtaatgtcaggatcgagcagccccgtcgggcggataacctgttcgacgatttgcgtgctcttttccttttcaaaatcgccgggcgtcgcgctgacgaaaaccgcctggttgatgcgctcatagaactcatcaaaattcaaggggcggttgtcaaacgcggaaggcagccggaagccgtagtctataaggttctgctttcttgcgtggtcgcccgcatacataccgcgcacctgcggcagcgtaacgtgcgactcgtctacaaacaaaaggaaatccttcgggaaatagtcgagcagcgtatagggcgcgctgcccggctttctgcccgcaagcacacgggaatagttctcgatgccggtgcaaaaaccgatttcctggagcatctcaatatcgtagcgcgtacgctgttcaatgcgctgcgcctctaaaagcttgccgttctccctgaaataagcaaggcggccgtcaagctcctcttccagctcatggattgcggccttcattttatcctgcgggacgatgtaatgcgaagccggatatatccccgcatgcttcaggtaacccttcaattctcctgtaagcgggtcgatttcgctgatgcggtcgatttcatccccgaaaaactcaacgcgtataatgctgtcgctcgacgcggcgggaaaaatctcaaccacgtcccccctgaccctgaacttgttgcggataaagttgatgtcgtttctttcatattgcagctcaacaagctttttgagcagctcgtcacggctctttttcatgccggggcgcagcgaaatgaccatggtacggtaatcgattgggttgcccaggctgtatatgcaggacacgctcgaaacaatgatgacgtccctgcgctcagacagcgcaagcgttgcgctgtggcgcagcttgtcgatttcgtcgttgatggagctgtccttttctatataggtatccgtttgggcaatgtacgcctccggctggtagtagtcatagtaggagacaaaaaattcaacagaattggtagggaaaaagtccctcatttcagaacagagctgagcggctaatgttttgttatgagccagaatcaaagtaggcctctgcacctgctgaataatattggccatagtaaatgtcttacccgagcccgtaacccctagcaaagtctgctctttatccccttttttgattccctccaccagcttggaaatcgcctcaggctggtcgccggttggcttaaacggggagactaatttaaataaattctgctcgctcataggcatattctccatccaataacttgtacgaaattacacgaatttcgttctgtataagtatgcatttcctgattttttgtgttttacacgaatttgctcacaaaccattgagaacgaatgttctgattcttattttacatcatgacacgtattatgtcaatcgttatattatagcatttctcgactggattttcaactcgattgtctaacatcgaaccattcatgctgtaggagtacaatacatcttggacatggaacagaaaaaagagtagaaggatgaggcctcatcggttaaagttgagttaccacacttaaccagaccgagaggaggccacatccctcatgagcaagagtataacacaggacatggcatatcggcaatccctgatgaaatacgcggagaagtacggcgtagggcgtgctagccggaagtataacagggcccggtcgtatatctacttctggaaggcgcggtgggacggaagcgtgcagtccctggcgtgccagtcccgccgccctcatcatcatcccaacgagcatacgccggaggaactgaagctcatccgggacatgcgcagcagaaacccaaggctgggcctgccggagctgtggcacaggttgaggaagcggggatatacccgccgcccagagagcttgttccgcgtcctgcgcaaactcgggctgtctcccgccgcacctaaagcggagccctataagccaaagccttacgagcggatgacctatcccggacaacgggtacagatcgacgtcaaggtcgttccaagagcgtgtatcacggactcgcagctacgcctgtttcagtacaccgccctcgacgagttttcccgtctgcgcttcctctgcgcttacgaggagcagtccacttactcctccgccgacttcctcataaaaacggtcaaatggtttaagcgcaggggcgtcaccgtggagtgtgtccagaccgacaatggctttgagttcaccaaccgcttctcccactccaggcgggacttgaccaccttgtttgaagccaccgcacaggatctgggcgtacggcataagctcatccgtccctataccccaagacacaacggaaaggtcgagcgcagccaccgcgaggaccagagacgcttttacgcctcccaccgtttcttttcccggaaggacttcgccgctcagcttgcactccacaacgctcgctccaacaacaggccgatgagacccctcgcctggctttctcctcatgagttccttgctaatttccttgtccaatatgtttgacaatcctacaattgtctaacatcgaaccattcatgcagtgttattatcagctattataaccaccgatacccacttttctgatatcatgtaatactagatctataataagaaaatgtacataaagaatacgcagagaattctcagttcttatcgtggcaaacgaagtatgttaatcgaatgccaaaaggcgaattacattctataattaaccttttggcatccgattataaaattcactctttatagctcggcttttggaactttttccatcatcctctccaaataactaatatcaatcccctcgattaattgctttttatctgtatagacatccattgccaataatggccggctatgccccagagaccgtcctatcgaccatttttctagatctgacttctcaagaattgtcgtataggtatgtcgcagggagtgccagcgtacattgggaagagcagccttttgaagcatctttttaaacagattatagaaacatcccctgctccttggattgcctgaagaggagcaacagataaagttcatatccttgaattcaccattctgctgtttacgctgctcatacaatattcgctctttcataatttcttcgtaaaccacttctggaatcgtcagtattcggttgcctgacggcgttttggttttgatttcctgcttggtctttgttccaaaagccagctcccttttatcttttttcggatctgaccccagctgtcgctggacatgaagagtttttctcttataatctatgtcgctatacttcaagcctataatttcacttcttctgagtcccatcaaagccgctaacaatagggggagaaaaagagcagtaccctcactgacttttaacagagcacagacctccgccaaagacaatacgtctttggcggaggtcgacgcaagtttttgtattggacggtgtagttgtattccttcggacggatcctgaagcagatagtgatgtcctactgcatattccatagacgtgtgtatcacaactttcattaattcagcgactgagatggacttttccattacgttcttatataatgctgcaatatggcgccgattcaaactggacattctgatatttccaacctgcggaataatataattgtaaacacagtttttataagaattgtaagaatcgcaggacaaatagggccttttaatactttctagccagaattccatatattcagcagtcaaacaggtggtatcagaaatatatatttgtctttccagttcggaaattgttttcagtctagccagttcagcctcctgaagattcttaaaaccgtttttctgctgaatactctgtccgttttcaaaggtcatcaaggtccgaaatccaaatctgttccggatggcgatcacattccatactttccatttaagcaacaccccaaatactttcatcaattttatcttccttcgttttaaatatcttatattgaccgataaagaactgtaaattgatcgtttatatacgatgcgatctccgtgctgttttcaatgagttcaccataatggatatacacctcagacgcttttgcatatcccaataagccggccagcttttcatacgatattttttgtccttttatcataattaccacgtacaaatcccttagcccttgtaccgtcaggatcggcaattcttttttctcacatatttttttgagtgctatattaaaagactccaaacttttgcagcttccgtctttctgacagcagatatacccatgatcaacatagtcctctatccaatacttatatgttgctatgcgttcttgcctttttttgacttcatccaaaacaccttttggtacaggcagattacgctggctggattctgtgtttaatgacttctcagtgggtactccctttttctggccgctgtcatcgctcacctgtcgataaatggatactgtagatttctcaaaatcaaaatcggaaaactttaaaccataaatctcaccctttttaagaccgcaatacactcccagcataatttctaaaagccagttagtcttcccagccgcttctaacaaactgcatatttgttcttctgataatataacgaattcctttttttcttttgagcaacattctttcatatcggatatgggacttttctttaggtatcctttttccaatgcatttgcaaatgactgactgaaaagctccttagccttttttccgtaagatggtgttttttgagtaacctgacgtattattgtgtctaaatagtccccacttaccaaataaaggggaatattatttaacagcggcaagattttacgatatgcgtaactgtaaatgtttttccgcttgacggataggtcttttctttcaaaccagtccacaaaataatctcgaaataaaagctccttatctggctctccctgcgctaaactttgttgctttaaaaattcagttaaatacaaatcgttacttttctgcgcttcctccggtgttttaaaccctcccttcttgccgtattttacgttcccatcttccgcataagtccttgtcctgtgataccatgaccccctttcaaaaaaaactgcgcctgctttactcactctagccacacgatcactctccttaaataaaatatttgggggttaatctcccatttggttagacttaaattcatatatcaagatgtacacctatattgcttttgtcaataaaacttataatgttttttaacggcacaagggacgcaacctaattgcggatattccgtcttagaaaaattcatttatttgagtcactccaaacaattaaccagcacatgcgacaacctaaatagtgaaagctgcattgtcaagaaaatatccaatataaaattttcagcacaaattgaggcctgccaaaaccggcaggcctcaacagcattcttttagctcatttaatcattccatttgtacaatctgttcgtagagcaggatgtacttgcggtcaatcacccggttatcatggtagtggccaaaaaaccaatattggaatcggcagttgttcattaatgtttcaaaataatcggtcaacctgtcgtgccggtacatcccaccgctgatagcgtccattatgctggatggacagcaatgagaaaggatataatccacagtcctggcgcaggcatccagattatcttctgcctcctgatactccatgtcgttcggcagctcgtccgcccaccaggaatgatggttcacccgataaagcgccaatcgggcatccaactccttttttctttggcggaaatccggagcatccggttccagaatcccatccgagatatcatgggaggaggcccctcccattgtgaagaaccgtttttcgcacaggtcgaacatctggcctctcataagatggaggatagtagggcggataaactgtactttaccgccatgccagtattccgtagtgtatccagacaataaatcataattctcatgattgcccgatacgaacaaggtagtaaacggtttatcctccagccaatccagccagtatttctctcgctttgacccgtcccaaacgccgccgaagtctccgcagattatgacataatcctgctttgtcattgttttctgttccggaaaattctcactgctgaaacggttgaattctgcgtgggtatcgccggttatgtagatcatcatatcacctcgatttagagcttcttagccatcacccttcttccaatgaaagcaattagcgatgtactcttattatacaccatcctggaaggaaagtgttacgccacaaatgttactgaacatacccgtagtttttcgcactctgtgaaacatagctataagttattattattctatttattttttagctgttaagtccaaaggaagaccgtccgattttttgatgaaatcggacggtcttcctttggctatatttctctatttccgtttcttttatctctgtggattaggacttttcagtaagtctaatttctccgcaatcttctcaaatcactcttacatactcgctttgaacacatccacaatttcctcccgagtcagcgccttgtagccgccttccatgagaaccgtgcttttcaccaggccctcgaccatgtcctccttgacgcccaggtctttgatgttcatcacaaggccgagccctttcatccaattctccatacgattaagtccctcggttgccacctgttcgtccgtttttccctgcgggtcaacgtcccatacatttgcggcaaaccgagtaaatttcgtaaggccgaatggacagatgtgccggtagtaggccagggaaaccgccgcaagcgtcatgccgtgggcggcgtcggtatgagcgccgaccgcctggccgagcatatgcaccatccaatcggtggatttgcctttggcgacaagggtgttgagcgcccaggtcgccgtccacataaggttgctgcgcgcttcatagtcggtcgggttttggatggcgacacgggaggaatgaataacggaacgcatcaagccttcgctgatataatcgctggtgttgtcatcaagcccggaaaaatactgctcgcagatgtgattgaagatgtcgtaaataccagccaccatctggtattttggcagcgtaaaggtaaagacagggttgagaatggagaatttcgggaatacattatcaccgaacacatggccgattttaagcttttgctcatggttggtaatcacagcgccgccgttcatctctgaaccggtgcccaccatggtgagaacgcagcctacggggatgatcttgcaggaaacatcctccatgcgaagaaaatacttctcccacggatcttcctcacagaaagtggagacggataccgccttggcatagtcgcagacggagccgccacccacggccagaatgaaatcgatgcagttctccttagcgatttggcaaccttcatacagcttttgcaccgtggggttgggcatgacgcccgcgtcctcataaaccctctttccacacgccttcagaatggccgccaccttatcgtaaatcccgtttttcttgatagaaccgccgccataaacaagctgtacgttgtttccgtacttgggcagttcttcgtttaaataatttagagagtcctcaccgaaatatagtgttgttgggtttgcatagcgaaagtttcctaacattgttgtttcctcccatttatgtttcgtttatcgtcttaatctcttttgccggaacaccgcccatgacggtgttttccggcacatccttagtcacaaccgcacccgccgcaatcaccgcgccatctcctatcgtgacgccgggcaagaccgtcacgtttgcgccgatccaaacattctttccaatccggataggcgcgggccgcaagtcccggcgacgagagggactaaaatcgtggttgagcgtagccaataccacgttgtggccgatcagcgttccatccccaatgacgataccgccctgatcctgaaacttgcagccgctgttgacaaatacatctttgcccaccataagattttttccgcagtcggtgtaaaagggcggaaacattccaaagcccttatctatgggatgacctgtcagctctgcaaataaatcccgtatttcctcgggcgtgtgatagctgctgttgagctccgcagtcaattgtagcgcctcctgcgaaagcgcgcacatacactggtgagcttccgagtcggcaacaatggatttgccgctattcatatggttcaaaaattcgtgtaactccatagttatcaatcatccctttcaacagaggttcatactatactcctcataggcggcaagcccttctttcaaacgacttagtccgtcgcataaaacagagcgtgggcaggcggcgttcatgcgcagaaaatgttcgccacctttgccgtactgactaccaaccgaaagataaagccccgttttctcgcggataaaacgggccgcctccgaagcaaagccgactatttttgtgcagtccagccacaaaagataagtagcctgcgagggtaccacttttaactgcggaatttgttctgctatatagtcacgcaccgtctgtttgttttcctccagatagacgcacaaatcgtcaagccagtccgcaccctcggtgtaggctgcgatagcggcgtccaccgcaaaggcgttcggctcggcaatttcatctgtgtttaaggctcgccagaccttatgacgcagatttctgtttggtaccatgaccgccgccgtttgcaggcctgccaaattgaacgcttttgtgggtgcaatgcaggtgatactattttctcggcattcctctgagacagaagcaaaggggatgtattcgcatcccggtgtcgttagatcgcaatgtatttcatcagcgataatggttacatgatgctttgccgcaagcgttcctatttgctccagtgtttccttatcccatattttgcccacgggattatgaggattgcagaggatcatcagcgtggtctgggggtcggacagcttttgctccaaatccccaaagtcaacgtgatattcctctccgtcatatttcagcggattttcaagcacctgacggccgttgttcaggatggaattaaaaaagatatggtaaaccggcgtttgaatcaataccttttccgcaggcgcagtaagtttacgaatgatgctggaaatagccggcacgacgcccgtgcagaacacgagccattctttttccatttcaaagtgatggcggacacgccaccagccccgataggcttcgtaccacgcatccggtaaccctgtgtaaccaaacacaccgtgtgccgcccgcacttcaatggccctacgaataggcagagcggtctgaaaatccatatcggctacccacatgggcaattcgttttcacccacatcccattttagggaatgggtgccgcgtctgttaatcggcgtgtcaaaatcatatttcaatttcatccctccatttcgaaacacaatttagtccactgaaaatgtaacggtaacatctccgccgccgagagcatcttcccagccggacaggtcgtcgatttttcccagtctcgtatagctccaggaattagagccatagaaaatgacaatttgattgccgttatatagaacaatatctccggacctcgtggtagtttgactgttgcttgtgggaagaccggttccaagagctcctgctttttcaaatccagaataatcacgcatgtttatgacgacaggcgccttttgcatcatctcgacaaaggaatccactgcggcattatccgccagggtatcggcaaacgtgagaccatcaacctgtacgttcattttcgtcactgcatcttcctccgaactggtatctttcgctggtctcgaagaaggcgccggcgaaggagacgctactgcttctgaagaaggcggctgcgaactatttgcagactgcgtctgctgagatacggtttgcgattccgaggaaggcttttgagacgtcgccgaagactgtgcctgctgggatgcagcggagctgctttccgagtccgcgggctccggagtaacggaagacgcgcctaccgcttcaatttcgatcttgcctgtcaaatcagcaatatacgccgaaccggagacagcctcgcccaattcatataacccactggctccgccgcaatccccataataaatggccacatcgccccaaggcgcataataggcaagcgttcctgccgggccctcggccaaaggggcgtcactggtattcaatttttcggggggataaaatattttttcattattgctaaaattttccacttcgaccgacaagggcaactgatcataaagatcgcttgccgctgtagaatcattcagcgcaaagacgagttcttttccgtccctggttgttatttgaatttgcctgtcggtatccgtctgctttgtgctttctgttgacgccccatcagatgcagccggagcctccaatgacgacggattctcattatcgctattacatgccccgagagaaagaatcagtacaaagccgcccagcatcgaaagaattcgtttcacagccttactcctttccgtcatgaacgctcctgcccatttcataggctttgttcaaagcgggatgccctttaatcgtgcccacagcatccacgccgcccgcaaaaacagttccggcgagacgcgctttggggaagcactcaatccagccttgcaggccgttttccgctctttgtggcacgctctcctcatcctcagccgcggcggagagcatatagatgtcacgaaagcgatagtctgaaccgtaaagcggattcgctcggtccagcatggttttcatctgtccgcacatctcgtaataatagatcggtgttgcaaatacgagcacatcggctaccatcatcttctgcgcaatgagttccgcgtcgtcatgtataacacatcggtgggtcttgctgcaggcgaggcatcctttgcagaacccgattgtcttatcgtacagacacaccttttctacttcattgccagcctcttttgctccccgtaagaattcgtccgccagagtttctgagttgccgcccttacgcggacttgtggatagaattagaatatatttagccatcatttttctccaatctttatcattgctctataggaacagctgcaggaaaacgactgcgccaaaggctatgagaattccgccgaataccttgttcatatatcggaaggtgcgatctcccgttcttttcttaatggcacaggttgcgccggaaagcgttccccaccaaagataggttcctatgaatacaccgcacaccagcccgatcccgtcaagtggtcccgtgacgccagagataccgaaataggagaaggcaaacaaaaacgtcagaatagctgccggattggtgataccgatggcaaaggaggacagaaacatcttaatgcagcccattgcctttgcctgtgtcactgccgcttcctcttttttcagaatcagtcggattcccataaataggataagcccgccgccaagaatattgatgagcgtctgatactggaacagaaagtctgaaatgagtgtgagaccaaaagctccgacgatggcataaagacagtcggccaccgaagaaccaagtcccgttaaaagtccggctctaaagccaaagctccaggtgcgctgcaccgtcatggtgccgactgcgccaaccggtaaaccgaaaagcaacccaatcaaaattcctcgcagcagatagcctgccattttctcaccgtcctttcatgcaggaaagggaaatagctgaaaggccattccccttacgttgcggttcatgcacactcagcttcctttgatttccgcccgcaaataattctcgttttgtcaggatcaattttgtccgcttccatgatgagctcaccgatggcatcggcacgaatgatgccgcttgtcgggttcatgacgctgtcgattgcactgtcaatctcggcatctatagtggaatactcaaaggcgagggtggtgtttaagagccgacagttcttcatcaccagattgtcgatgtaacacattccctgcaagctctcaatggtacagttcacaagggtcagattctttgcattccagccgagatattcaccggagataaaggaatcatacacggtcacatgatcgctgttccagaaggcgtctttggaaagaaggcgtgagttatgtatttccacattctttacgccgtcgaaggagtagttcccatagagggtcaagtcgcggatcaccatgttttcactgttcatggcgaagtagtcgccctttgccgtcacatgctccataacgactccatcgcagtgccacatggtttccgacgcgaccgggagggatatgtttttcagtgttacatcatggcagcggcggaaatttttcggtgcttctatggcgctgtcctccacagaaatatggtcggtgtaccagacgccggcccggcccatctcaaaccaggtgcagtttttggcggtgatgttctttgcataccaaagcggatacttccacttgaacatgctgcccagcagctcgatattacggctctctttgagcggcgactcaccgtcggcgaaaatggtatcgattattttcaggtcatgtccgccaaagagcgcacgctcgccggttagtaaggcctcgcggtattccttcttttggttcatcaggtgttcctcctaaatttatttgttggcgcctttacttccttgccctcttcccagcataaagagcagatagtctaggcaatcgattcgcttttggtctttatggagatcgttcagtaagcagcggcgatgcttttgcaacagccgtgtaccctgatcctgtctgccgcactgccaatcattcataaaggttcggattgtatcttgatcgcagcctgcgtctttcaggttttggatgatatcttcatcacagcgatacccattcattttctcacacctctccgtggaatttactcctcgtcgctgatgtgaacaattttattgccccagccctcaagtaccggattgttccgaacggcgctgacaaacgcatccgtcacatcaaagtagccgactggagtatattcgccagaaaccgctgcctccccaaagaacaggacgatgcggtttggttccgaataatagaccgtacccgccttctcggttgtcacactttcaggatttgaggggatgtcatagcggttggggatgtcgtaatactgcatgacctgccagtggtcataatcgtcataatggtaaattggcagtctccattcggcagtgcccacatgccgggcgatcgccgccgccgtgtcgttatcgtagagatgcatcgtaaaaggtgcaccgtcgtcgccaaagcgtacatacagctcacttgaggctgctgagcctccactgttatcggcgttgccggaaccggcattgggcgaggcactgttcgctgatggtgcagcgttcgaagttgtttcacttcccgttccgttggattggttacagcctgccaacatcatcacaaacacgagggataaagcaaggagaaggaaaacccttctcaacggtttctttttcatagcaattcctttcctacgcctatggcacatttcaaaatctgaagtctttttgcttctgtaattagtataagcccacagaaataatatagcaaatacttatattggatagttaaacatactttaaaggcatattaaagaaatgcgccgttgcacacctgcaaaacctgcccttttacatgccgtcccattttgctggcaagatacaaacaggcgtatgcctgatcgaccggctcgcactccgggccgggaaaataaacaaaatggccgctgtgctccagcattttcgcgccgcccggctgatctccggccttattggcaagatgagccggtgtcacggttgcgcccggcgccaccgcgttgcagcggatattggtttcgatcagccgcatcgccacatttttcgtgagcgtattgagcgcgcccttggtggcggtatagcttgcgccgcagaacgggcgtgtgccgttcaccgaggaaatattgatgataacgccgtcgtccttcggcaaaaagtattttagtgcttcgcggatatagcgcatcggtccgccaagattgacgttcataatgtgttgcatccactcgtcggtggtttcgtcaatgatggtctgctcgccgattccggcattgttgacgagaatatccacatcgccaaagattttaatggtctcctcgaacacgcgcacagtgtcctccgtagagcccgtatcagccatcacgccaatggctcgataccccttttctttgagctcactcacgactgcatccagcttatcctggtggcgggccgttaacacgaccgccgcgccttcctcggcaaaaatctctgcaatcgtgctgcccatgccgtagctggcgcctgtaacaatggcaactttgccctctaacatctgtttatccatcgtaaaatcctcccatcgtatttttctttattctgtaataaggatcgtcaaatccgtccgctttatctttccggccgccaggtaggcaaatcccatgaacaacagggtgacaagaaccgcggggaaaaagacggaaagcgcacccgggctggatgtaaaattgctgataccggcaaatttcataaccgcggacacaagcggatcagtgaacaccgcagctaaaagtacgccaatgacggagccaagcgcggcgaccatcccaaaacgcagtgagaaagaaagacggagctgccgatccgtgaaaccaatcgccttatagatgcctatatcccgctgctcggccgaaagaattttgctgccggtcatcacggtgacaatcaggataaaaagcagcaccatagcgtacatgaacgcgaccaacgcctgcatggcggagatgattccaaataagccgggccatgtgttttcatgcacatgtacatcgccaccgaacgctgcgtcaagagcctcggtaacggccgctttctgcgtcggatcaccgaggaaatagtggtggcaccaaatttgcgggtcgtcacgcccgattttcaggtagccctcccgattcatccccacattggctcccatttcgttggcacaggaatagatgcctgagacaatatactcgccgctgccgctgtcacctgtaacggtaagcgtatcgccgatggagacgcctaaatcggcagcgacaaactcggtcaggacaatctcattggcggctgtgctggttcttccctctaagatgtgaaagcggtccggctctgtaatcacattggcggtgtagtcgatgccgtttaccgccacgccgggcatagccagcagataggtatctgtaatatcggtaaggacaagaacaatatcccgggcgtcttcgtctgtgtgctcgccaaacatttgcacgccgatgtcgtggtcggcggggttgaaggcgtccatcatgcccttgccgtccgcgcccagccatgtgtccatgcgcccgatcacagaggcgaagaacaccagaaggatcgctacaatacagacgctcacatattttttcttgccagtgagcagttgccgcaccgcaagagaaatgcccagatgtttcccatcaatgtcagacgttttctgtggcctgaaggatacgccttgtgcatcgccgcggatggctttcatcggactgatgcgccctatttttgcggttttcagaatcacgaacgcagtaagcagtaataaaaccgcggcaaaggttccaagacacagcccccaggggatgctcaccgggatacgaatcccggtggtagtgagtgccatgctgcccaccaggcggctcagcggccctgtcagcgcgataccgatcagcatccccggcaggatggcggcggcagcctgcataagctgaatctgccgcagcttagtgctcgtgaacccggcggtcttgagaatgcccatattgacggtatccgcttctatagcgccggtgatgctgtgtcccagcacaatcaaaaccacggcgagcaggatcacgacaaatgcgatgagaagtccgctgaatgcgttttgcagaatcagcataaatccggtaatcgcatccgcactgtgaacaaattccgtgtagttaggcaagtctgtcgtttcgttgaggattccgttcagctcggcggttgtcacttcgctgtcagccgtctgaaaaacatgcagcatggagccgccgcgcgctagcgcgtcaataccggaatttgcgatggtatctgtgattgccgcataatcagcttctgaaattaggaagcccttcatgccgatcatggagctgcccataaacgggtcttcgtagaagcccgacaccgtgagggccacggttccgccgtttcgtgcaatggaaaagtcaatggtatccccaatcttcacgcccatcatggagatgagagaaggcgaaacaaccacctctccgggagtgatctccggcgcgtcctgtttgtaaccgttcaggtcatcggtgaaaaaacggtagcggccttcctcgggagcaaagagaatgagttgcccctcgctgtcggattgctgttcgtttgccgtatagtttgagaaaacaaggttctgcgtttccacacgcgcaacatcctcaagtcctgctatttcagctgccagcgcagcctcatccggtacgccggacacccatgcggtcagctccccaaagcctgcgcgggtgagttccgaactgatatagcttcgcgagtttgtccaaaccgtcagcacagcgccgagggaaagggacgtgagcagaatcagaataaaaatccccgcaagaacgcccctatgctttttgattcctgcctttagtaatgtgtactgttccataaatgtccctccttaccagtgcaaagaggagagccactgcgttgcctgcgcttcgcgctccctcgcgtctgccgcttggaaaacaggctgcgtcagctcgtcgaaaatcttcccgtcctccatatagagaattcggtttcccctgatggccgcccgcacatcatgcgtcaccattaagatgctttgtcctgcttcattcagggaagaaagcaaattcagaacctcctcgctgtttgaccggttgagagcgcctgtcggctcgtccgcaaaaatgaggccgggattgttaatcatagctctcgcgatggcggcacgctgcgcctcgccgccggaggtctgggacggcagacggtctttcgcgccattcacattcatctgagaaagaagcgccgaggttcttttctgaacttctttcgggctgccgccgcttacatatccggacaccgcgacattttcaaacagagtcaaattgctcacaaggtgagtttgctgaaaaacaaacccgaattcctttgcccgaagttccgccatctgtttttcagaaaaatcgctgatgcgtttgctcttatattcaatttcaccgcttgtgatgtgatccattccgctgagtgcatagagcagcgtggatttaccagcgccggaggcgcccatgataacggtaaagtcaccgtcataaatctcggcgtttactccgctcagaaccgccgtatgatcgccgttctgcgaaaacgacttgcagatgttttttccctgcaaaagagcttttttcatacagccatcctctcttcctcggtgtcttttacaatcagccgttttttccctgtgtttggatccggtcctatttcatcgacaaactgcacgtagaactgcacataggcaagtttcttttctttaagaatcgctctcatctgttccagcatctcacggcggatttcctcctttgaagccgtctgcgcggtttccgccagcatttcaaaggtatcctcactggtctgccggaactgataatcaagcagtccctcaatgcaaaagccctcgattgcgagcgggtgcaaaaattcccggttaccggttccatcgttaaaccatagaatatcctcgtttcttcccaagagccctactgctcttgtaaaaggatagtggctgctgtcatccggctccctaagtgtgaggttgtccgatatatgataacgaatgagaggctgtgcgaagttgtagagtgatgtgagatacatctctccgtccaccgattcgatcagattcatatcgtcaaacagaaccataccctccgcagggtcaagctccgcgcccatagcgagggactcgcttgccccataaaagttgactacctgtgtttggagtgttttttcaagataatgccgcaggctgctgccaagaggttccccgcaggagattactcgaagcaccttcagttctatatcaccgcgttccaccagctcagcaagaatcttaatggccgaggggtatccgataatcatattcggtttgaactcttgaatttggctgatccattcggcaaggggcgttttgatgtcaagatacatttgactggcgtgcacgccgtcaacgccgtcgcctactgccatcgctccgccatagcgcccatctgtcgccgccaggtatgcgatgcgagggccgcgggcaagcagccggagaatctgcggcatcgacatattccacagcgctccgcgaatgatacccagcagcatactgctccacgccgcctcatcatacagaaaatagccgggcctccccgtactgccggaggaatgcaccacatggtatttccctttgaagggtttacggtctaccacctcttcggcatcaaaccggcgcatctcctcctgtgttaaatcgggtacggtgaccagttcatcgaagtgcgtgagaagatctgccttgctgagggtgggaaactgtctcagcggtgcggtggcgatattatccttggtgattcccgctgcataaaatgtcttctgatagtagtcggattgttcaaaggcaaaagtcaacatttctcgcagcttcttttcttgtaattctttgatttctttacgacttttcttttcattgcgtttgagggaatacaactcccacaatagtttcagatagttcatcaggctgccctcccttatttgatcctgaacgtgtagcggttatcataattttcacggtggtaatagtgcgccgtgccgctgttcaggttgaaaacaatactccactccgtggattcaaactctccaaaagtgtccttgctcacgctgtcgagtgcgtcacgcacgccctgcatatccatcgtctcattttcagagagtgtctgtgtcaaaatctcataccgctcatgggactgggcagtgccgatgccgtttttttcaccctcggcaagatagaagtttgtcaccacggttgtttgggtcacaatcatttcgttatttacatattccacgacgacgctgcgccctgtggtatctgtgagcgccagatgaatcatcatccccatggaagcgtgcatgtcgtactgccggagcagttccagcgcttcctccacgtttgccgctttgttcagcagcagacgaatggctgtggtggtggtaatgtccggtttattggtgttctgctcgatcgttgccgaatcctgaatcatgttgaccgacaccgccaggcccgcttcattcataccatccagcggcgcatacaatgccgcgagggtgcgtatatcatttaactccaaaaccgcccctacaagtcctccgctctggctgataaagtccatattcaccgtggaaatcgaagcgtaacccgtcttgggtttcgaggaaatcaccagtgcgtcacagttttgccaatcaaaatttcttccgaaaagctgttccccacccgggctttgcaccgctatggtgctgcatccgaagagactgccgagaatatcgaagtctgctagcaggtgggaggataaaaacgccacaacctcaccgtcggaggatgccccgccggcctcaagaaacgcttggaagccgtcatcgccctcaaattgaacggcagaaaacccatcctctaattccgtgatttcagaggtaagcgtgatggcagtgttttctgttaccgcttcgctttcccgtgaattactgccactctgtgtagaaacattctcatttgcctttccgcatccagtcatcagtatcgttatcagcgcacttgttattacaagggcaaaaattctttttttcatctcaaacactcctcgcgttgttatttggtgtaattctattgtaacagcgctcacatcaaataacaaatacttatatccgatacgtttatctgctttacaagcatacatgaaagtgctatactatttttatacgaaaggggacttgtttatggagtttcgtgttttacaatacttccttgctgttaccagagaacaaagcatttcaggtgctgccgaagcgctgcatttatcccagcctacactttccagacagctcaaggatatggaagaggaactgggcaagcagctttttatccgcagcaatcgaaaaatcaccctgacggaagaggggatgattctccgcaagcgtgcggaagaaatcaccgagcttgttaaaaaagcgcaggatgagatttccttgtcggatgaaaatgttgccggggacatttccatcggcgccggtgaaacggacggtgtccgttatctggccaagggtgcgcgggatttgcaaaaggactatcctctcgtgcattttcatatcgtcagtggcgacaaaaccaccgtgctggaggacctggacaaggggttgatcgactttgcgcttctgtttggggagatcgactcctcccgctatgactgcctgaagctcccctgtgccgacgcgttcggcgtactgatgcgccgggacgacccgctagctgaaaaggatatcattatgccggaggatttatgggacaagcctttaatcgtctccagacaatcccttcgggactccaatttgtctacattactgggatacgaagcagaaaagctgaacattgttgccacctataatcttctgttcaacgggtctctgatggtggatgaggggatgggctacgccatttgctttgataaaattatcaacacctccggcggcagcaacctctgctttaagccgctgtctcagtgtatcgagataaaaatgagccttgcctggaagaaataccaggtgttcaccaaagcggcggaaaaattcctgctgaaaatgcaggaactgaactaacaaaaacggggaaacagcgagataaatggctcgctgtttccccgtttttgttgccagactcgtttgtatcttgctcaacgtagggcttttgtctgcagaaaatcccgtatgtcctgctcagtgtccagctccatgaccgcggcagtcacgacatcggcctccgctttactccactgggcgataaggcggcgagtggtcaggatagagccgccgcccacggaaaactcgtccaagccgaaagaaagcagcaaggggatcatcagagggtcggccgcagcctctccgcacatgccgacgggaatacccgcagccttgccgcaggaaatgatatgtttgatgccgcgcagaacagccggatccaaaggagagcctatagacgataccgcctgatttccccggtcggccgccatgatatattgacataaatcgttggtgccaatggagaaaaaatcggactcctttgcgagtacatcagccatcaaacaggctgccggcgtttcaaccataatgcctaccgctatgtctttgtcatatcggattttttctctatccaattcgtctttcagtttatctacaatgcacttggcctgccaaacctcactgacgctcgtaaccagaggcagcataatcttcagtttaccaaaagcggaggcacgaaggagtgccctgagctgtgtttgaaacacatccctgcgttccaaacaaaatcgaatggcccggagacccaaaaaggggttatcttcattttcaagcctcagataagggatgtccttgtcgccgcctacatccagcgtgcggatgattacctctttgcccgcagccatcctatggttgtcccgagctgattcagtgcggatttaaatcgcttgtcgcgtttgcctccatagtagttcgccccgacgtcaccgagaatgacgagaatatcttctgcagtcaaatgcactcgcttgcaaaaacgttccacatcaaatggaaagccgtgaatatctcctgtgtaataaatcatttccattcctttcctgaatcttgctttactgctaccagtcagcaagtcccattccggataaatcatcattcaaagaggaggtgacataccacttaagtatgcgaatcgcaatttgtgtcacttttattatacaacagattcgatggaaagtgttacgccacaaatgttactggttatacccgtagtttttcgtagtcataaacaggatgattgttgccgttttgtctgcgggtcttatgatagctaatctttagagcatccatacgacttaataggtttaatcaaaaggcttggagatttatgacctaatctccaagccttttgatctaatatacgcaaaataagaaaaaggggggtgttaacctaataaattgctaatttgcagcatcatcaacaaggcctctgggcaatccatttcttccatcggcgtcgaattctgctacgatgcattcagcaggcaaaaattcaggatatccattattcacgacaatcagttgaatatcatcttttttggcctctgctatttcatataaatattttattatagcattaaatattttttcatccttaaattcttcatcttcattcttagctgcctgggcgcctaaattttttcttggtgaatcaattatcagcaagttagggtgacaaaattctgccgatgtacctactagcatgacagtcaaatagtatgccattgtaatgagtgtaaccccagctaaactacctatatcatcatatttacgtccacgtacatagggaagatatcttttttcgtcaatatatgcagtgtttaactttggatactcaaatgctttaagtattctttcaaattcttgagagagatcatttaataattcctgcttgtcaactgtgttttctgataacgccttaatattagcctttaatatttgaattgaagcatctttatccttgatgagctgctgatagcgttcaacttcttcaaacattttcatatctttttgcaattcaagtattagcctgtttttctttccaatttcataattgaaatattctatctgctcgatatttgggtttatgtaatcttttgataattggagcaattctacttcctcttcatgtagccttattcgaaaattagcttcattatgaagaattgcatcatatttacggtcttcaatctcaatgaattttaatagttcatttgattttcttctaataattgatatatctttttttattagtaaaacctcgctcttatcgtcactcttttcactaccacataaacaacacgtttccacactattagtacgagcaatcggctttaagcaattggggcaaaaaagaaactcatattgattaaatgcaatataaccttcgattgccaattctttcttttcaatctcactagcgtactgattatatagtagccgaagcttgttaagatattgttcttgatctactttttcctcgacaatcttttgcaggtcattttttaattgttctatctcttctcgtaaagcagttgatgcaacagtatcataacttttgtctttttttatagtggataattgttgctgtaaagattttatttcctgctcttgttcagctttcttctgagtacattcctgtaagttaacgatatcaatagattttaaaaattcttgtattccagagagtttaacggccaattccctggactcctctcgccttgtctccaagttagacttgaactcttccaaagttttatcatagattttaaaaataatctcaaaggtagcttttcttttaaaatccttctcccaagatttttctcctaaaatgtcttcattatcaatctctgtttgcttaatataacagtatttatataagtctcgaaagctaaatgcttgtccagatattgtcatgttcgccaagcccattttctctaacaaaaatgccgataatgattgagaattactgggagtatctatttccaatcgattatagaaaagaaacttttgtttttcttcattccaagtttcagcaataactgccgctttaaaatcgaataattgacgccgcaatctatatttttcactaccgataaatagtaccaactctacttgtgaacatgtacttccaatctcaatatacgatttgtgtcctttagagcctaatgcataatcaatcatttccaatatagatgtcttgccagttgatgtatgaccggaaatataattaaaaccgttgcgaaatttaactgtataattttttctcgtgccaataagggttaaagttactaacctaattctaattttcatatttaatccctcccgcccttaaatacaaattagatttttcacgaatgagttgttctattgccgattctgaaagtttaattacttttggaataagtttatctgacaaacccatcagtctgtttttatagggtgtatctatactactaagcacctttgtacctagttctttaattctaaaaaccaccgcatgattgtctaacactttttcaataaatccttttgaaataagaaagttcaagctttgtctatacctgattaaatcaggttgccaatgaaaaaacgcataatattcatcaaaattccatttcatatttagttcgtgcacctcatctccaagcatagtacacggaaattttaaaaaatagtcatatagtttgattttattctcagttgtttttaatgatttgcggtttttaactgtctctaataatattaaaattcgaactgcatcattgatatattcggaaaagttagcttccatgttcttcacctccatttcttaaatactcttctaatttttctttataatccttgagccagcctatactgcattcttcggcccattgatgaagaatgcctttttttgccatcaaacttatttcaggcaacggaggacaactcaaagttgttgtgtcggcatcttcaatacgctcatacgtcctagtgagcaaatcattaccatcggtttcgtcctgataccttctatattgagtttgccagaaagtatgtactttacgtttaaggttatccaacaatcgaattcgttctggatcgcctttactctttataatgtactcagcaaattctgcattaaaaaagtcttgtttgcatccgtcaatcaaattgatatttgcattttctagcttttttacaaatatcatattatcatagtcatcagcttctacatcatttaagagtagaataatttcattggaaatacggcttttttcagattcaaaatatgaaagaatttcgtctagtttttgccttacatcatcatcaaatacgctgtcatacatggaattctttttcaattgagatataagataacctccatcgaataaagttatatcaattccatgaattttacgtttttgtgcgctccattcactccaccacttaaactcttttgcactaagagtgcaaggaacacatagaatccatcttttcattgtatagtccagcgattcaactgcagtcttaaatgattttcttatttgatctttttgggaatctcccaaaccatctatgaaatatttgcattgataattatctatggggtttgtaaaatcacttaccaaaacgtctataccccatcaccttggctgacccgaatattatgagcatcatttccaaaccaggattgtaataattctgtacaaattctttcaaatatttctcgtgcaccagcatccccatgctgatccctcaaatatctaaaatctcgttccatattggtacctccataatgtactatataaagttaaatctgctaatttgatatcttcaggccgcttaataccaaaatattgagttaaaaaatatatctacatcttattttgtgctttatgtgaaaatcatacaccaccaaagattttagcttatcattcacatgactttcgggcgcaaccattctttaatgcaaattactgatcacaaaacatcaccgaccagagttttcataaactcctgatgctcaaaaagtatgtgtagtaattccttctcttgcgaccagctcagtggttctgaatggcagcaggtgttgcgcagctttcgaaattcctccagctcctcggcatacgctttccaccactgttcgtcacaaacctgctcaaacaggagggccttgcgggaagccaaacgcgatcgcaaatcctctttgtttagaagatacgtaaaggtacctgtcgttactttttgctccttaatctcccggagtttgttcttgtatatctgctcgtccggaaacagcgcttttagctttcctaagagtaactctttcagcatggattccattgtcttgcagaacaggataccggcgcaagacgcgtccatctcctccaagcgataccgttctctcatcatagcaaacaattcatgcagcagaatgctgctggtaagcctttgcctgatcaccggcggcaggcttttcatgtccgacatggtaaggccgaacgtctccaactgcgccgacgtgagggaactgtttttccacagagtatccagttcctgaaaaagcggagccaccaaactgtcgtccaattctccgtccatggtcagagagtcggcgtcgggtgtttctttaagcaatctctcaatttgttttccgtctcgtggcgcatccggattgtcagagactttctgtaaggcgcgcagagcgtagctatccagaatgcctttcacttttcggaataaagcggaatgctgccaaacggtatagtcgccgattacatacagacgatattttgcccgagtagccgccacattgacaatgttggtgttcacccagcgaaccgccggcaaggcgttccgatcgcagccaagcagaaaaatgaccagatccgcctctttgccctggaacgtatgcaccgtcccgatgcttttttctgcccactcagcaaatcgctcatcctctttgtattccggcttggaacggatcagctttttcattccgtcccgcacggtggtaaacggggtgatgacaaaaaggcttggcatttcttcggttagctgaaaggctttgcggataagttcccaagctttttctccttgagttttcacataatgatccttacccgctgtgttattctcacttccgctgacattgatccaaccggaactttcccggcagaagccagcttctttttctggtcccggtaaagcagtctgctgcttcatcatctggttataggacaacgcattggataattcaaacatgggactgatacagcgccgatggacgactagcgggcaccccacccaggttttctgtccgtcatcgatatacgtagtccccaccgtattcagccgatcggcgaacccttggacagaatgggttttggattgataaaagccggtatagtcattttggatcacctgtttaatcaaatccagctcgtctgtcacaaccggttccacctgcttgggatccccaaccacaatggcgcgacggcagcgaaaaagagaccccaacgccatttgcggagcggcttgtcccgcctcgtcaatgattaaacatccaatttctcccggctgccggatggaggacagcatattccccgccgacgcaaaggtggtggaaagcaccggagtgagtaaaaacaccgtgttcagtaaagaactgaacgcggcctcccggtcgcgctgtgaaaagggcgcaggagttttcccatcatctcccggttctttccaaagcagcagcagatttttgaaattccacaaacaagctttggatcccaacaaaaatgccttgtgaagccttaatgcctcgtagaacagtttttcccgttcccggttataaaccgccgtttgccagggattagccacttgcgccgccgtggattgtccgtcgtccccgctgtcatacagacggaagaaatcctcgtccagaaccgccatggcctgatccgactgtcgttcggaggcctcctttaaaagcgactgatagaggatgcgggcctccgccaccttttccaagtactcctcaattttcagacgcagttggttgccctgttcaagacagtctatccgtttctccgaaagccggctttgccgctcttccagacccgcaatcacatcgaattgcgcatcgtatttttggacttgccgctttaactcctgttgcagcttctctgtcttggctgcctcgcttttaagagcttgttcggcctcggtcaatgcccgatactgctcctgtatggtacgggacagcatggtggggcggcgaaaaatctccaaaacgatgtcccgaacccggcgactatcctccagttccctgatttgcaggcgaatagtctgaattgtatttacaaccgccgcttgattcctatcctgctgtacttgacgatgtcgtatgccagccagctccgcttgataatcctttcgcgtctgctccgccagcctcgactgctgggccaaattctgcagttcttttaatatctgtgccgctgtccgctcctgttggacccgcagcgcctcggctctttgggcttggttgtgcagcgatgctttctgccctaaaaagcgttttctggcgccactgacctgctggagttcttgttccaaccgttgtactttttcaagttgcttttgaaagcgctcaaccgcagctgtataaccggctttatgccgtcctatgctgtcgttggaaccaaagcttccgatatagggctttaatacagcagccatatactctttcagattgctcatcttcccaaacggtgcggaaatcagcccccaacgatcccactcgccttctttccttttcgctaggtcattggccagcttggtaaaatagatatccgggtaagactgagattcataccttcctaactgttgattccatgccgtataggtctccctatccgcctcgtccatccgaaataaagcctgcacttccaaaagacctcggcgtaccgactcctcttccttcttgccgggttccattcctttgagcaaagctgttccgtccggcagttccttcgttatgttttccacagccgcgttattgcaggaagccaccagcatcccgtagtccttcagccgctcatcggcaaaatcataatagccccagcagtactgagagtaccccctgtgtgctttatcgccatcttgataacaccgccggataaacgcatcgtccggatcttcatattgtgcgagcaggcaagcccgttccaccacattgccggctacgatttctttcagtaaagtggttttccccgtacctggcgggccattgaccgagaatatcggcagattatccgaagagggacgccaactcaaattcaccgccaattgctgcatcaggctcggcataaacttggaaggccatttgccgagaggcgctttggcaatatccaaatggcgatggaagaaatcagcgcgctcttcttcccttccgtttttccaggcgctgcgtatatccaaccgcttcccaaaatccagccaatgcaaatccgggttttcttccgcatacaacccggttatgtaatccagtatcgcctgctccaacggattttttccaaattctccgctacgtattgcttgttctatcatatgcaggtcatccgcaaaaaagctgttggacagatcgctgtcgtgaaaaacctccgtatccctcgcctttgtttcttccgtgcgataccttcgatagatcatgacgccgtcccagtttatttcctgttccggccccacgatacgccgtaagtatttcttttccaatttatccatcatagattccagcagagccgaagtgagtgattttccaactcgcgcattctcttccgtctccaccagctgattgtccaaaggctgcatatccgactcatacgcatcgatggataaaaaatccgccatgttctcttttgacaattcgtcggcgtgatccaaaagccgatgaattccccaagctaaaggagaaacctggatactgcccggaatataccggcctcgttcatcacacttcaatccaaggaggcagaccgatttatgatttttttccggcagttccaaatcctggcgaaagacctgttgtaagcgttcggcaaaaagatgccgttccagctttcccaagcaaatatggatttcatccgaaagaacaccgtaaaaagaataaagatgggtacctctttgcaatgctgtatttggatttgaggaggatatttgttggcctgaagctgaatccccaacctgtctggttaaggcatgaaacaccgtgatttgttttgcatgggtttcccctttcgctgctttcgcacagagctcccgcccttccctgctttgcactggaaaatccggctgccccaggaattccaacagataccaatatttcacgattattgaagcgaaggtccgtttatccatcttcacaacccccatgtctctattaacatccaaaatcagcaaaagtatccttagatatctaggctagccttacttccatcggtcatacacaccgtttttcttaataaccaacattattcatccaaattataccatatttttcttttatatcctagttttaatttttcttcaacaatatttttcaattaaccattaccacgactgaagtgtggcttatatatgcctaaatagagcctgttttgaagaaccattgcattgtagacaaaaaagtcagagctacatacgctctgacttttacaattcgtttgattggttgtcctttgacgcttttcatatttctcaatccaaaatcagatttggattataatccggaatgtagaatgcgcaggtacacaaaacgtgtaaaaaggcacgatcattgatttgttttaattgctcctctaagattgcattaaatcagggagcaatttttgaatcctgttagccggatttttagttcctgcgataaaccacgctttctctatattttgacgaatcaccatcgtacattcttttttatcgatagcaaatttagtataatcgttatttcggttctccgcttgtaccctggatttatatcacttttgtcttagttcatccatactgactgtataagaattgtaagcctaatccgggatgcttttcatataaaaaaagcctccaccataggataattcacatatacccgtaataattttaagggtatatcgaaatttttttactcttattaaagactaaacttataatgccctctgtcgagataaaacacattctattgttcgatccgctatgattcctctgtcgcgcagggcatagtactccaacatcggctgtatgcctttcataagactctcccgtgtgaataccggcatagccagctgttttccatacaggcttcgggcagtgttcatctgccgagtgaacgtcatgttgaagggtctggctcgcagggtggagatcagcgctttcggggcgatatccatcggcgacatctgcgtattggaaagaagcccggcgccgttatcaaatataggacagtaatcataccgcccgtttttctctaatacagcgatattgttcagatggcggtcatcgttcaaaaacaacgcatccacttcaaacaaaagggcaaggtattgcgggaaatgagccagtcctgtaaactcggctgtggcatcggcgagataagcaatccgctttttatcactggtaaggccctctagcttcttctttaaaggcattcccagttgcttggaaaatagatggctgattgtaataatcgactgccccggatctaagaagtttatactggagcaccctgttctatcacgtccatgcgcgcttatgcgttccatctgataacgggcaaatcggaaaggtagccccttctctatattactctgctccagaagtgtggaaatcaaggtttcgctgagtgcttcataaccaaactgatccaacttataccagcggtcagtttgacaatcgtaccatttctcctgattgcctttcgaggatgtctccgcgattttttcattggtaaccaagtgaacggtcatttcagcacctccatttccagccactgtccatcttccgccatgcggccgaacgttttttggatgatctcgattgggtcgtactcgtccacgccgatcgtttccagatattcacgcagcccggcacgatcgcgagggatgcagcgttcctccaggaagttcagaaaatccaaccaggacggcaaatgattttttccaaaagccgttttgataagctgttttgaatagttttccgcctgcaacaccttgtctgtaaaatccgcggcaatcagggtacagagcgtatcaccatcataataacggtaataccggatatcatgtcccagggccttcttctgcttggcaaactcctgaatcgtttttgatttggaaattataatttgctcaccgtcaaatgccaattcgacctccctccgctcttcattgatccctagttcactcatccacgcggaaggaatcgataatttatatgtttttgaccctttggctgctgtaccgcccgcagttccaataatcatattcgccgttctcttttccattgtcgatcacgccccataattattttatcatattcgttacgaattatcaatgttttattaccgaaaaagttttatcaaccggcaatggcttcataaacaaacccagggactatgcctgcttcataaaagagggctgccggagaaatagcccgatgcccgtaacctagtacctaaaaaactaggacacacgggacagacggctgaatgaatgcggggtaaagtgaatatgcaagggaagggcaccgtcacaaaacggtgcccttcccttatgcccttgccagcgtctagtcccgtgggggaaagcgagtgcatcatgtcaacaatgatctaactggactactatcacggtcgtgaagcggaacaatttaccttttaccgcatccccaaggcgctgttcacagatcagcgtttccggcacatctcagcagaggccaaggtgttatacggtttgttcctggaccgaatgagcctgtcggtgaaaaacggctggatggatgccgacgaccgggtgttcatctactttaccctggaagacgccataaagctgttgtgttgcggccataccaaggcggtggcgctgttctctgaggtggagaaagtcggcctaatcgagcgcaagaaacagggccagggcaaacctaccaaaatctacgtcaagaacttcgcaacgggtggagaagtccaaactttcgaaaaacaaaagtctggacttcctgaaagcggaactctagacttcacaaaaaacggacgctagtaatactgagaagaataagattgatttgagcgaaactgatctatccatctatccgcctcttccagagccagaggtccgaaaggctcagcccgcccaccggcgggctgagcggatagatacgatggagcggatgagagagtacagaaagatcatcctggagaacatcgcctatgacgtgctggcggagcgtgtagaccggggccgtctggacgaggtggtggatctcctggtggagacagtgtgcagccgcaagaaggaaatccgcattggcggcgaaaacctcccggcagccgtggtgcgcagccgactcttgaagctggacgacggacatgtggagtatgtgctggactgcctgagccggaacaccaccaaggtccgcaacatccgggcctacctgctgacctctctctataacacgcccagcaccatcaacagctactacaccgccgaggtgggacacgacctgtacagctgaccgtcccctggacctgttacttccttcccaggggacagatgggtcaggacagggtaacgataagccctgccaccctcaaccgacgcatcaagaatggggactccatacacagaggcgcaaaaggcactctgggaggtagtcacgtcctacggccctcgttgaatcggtagccaacgccccacacggtttctatgtatgcgtttccctttggtgtgcccagctttttgcggagctgcttcacctgggagcggaccgcctcctcggtgtcaaagctggcctctctgggccacacgccgttgtagagctggtcccgcgtcaagacctgcccggcatggtccacaaaaaagcacagcaggtcgaactcacgccgggtcaggtccaggggctccccccgctgataagcccgccgggtcaggggggtgatgactaaatcccgcccgcataccagagtgtagccgggctttccgccgggtcccccggcgcgggccctgcgcagcagattttgggcgcgggccagacactcctccagattgaagggcttgcccagtacgtcatccgcgcccagagagaacgccttgaccgtctgttcggtgctgtcgttgacagcgagggccaggatgggcatgggctggagatcacgaatgatcctcagcagccgcaggccctccgtctcggagagggagaggtccaggatgacgagttgatagccttctttggcaaggcactcaatggcctccaccacggagagcgtgtagtaggcatccagttcgctgctttgctcttggagggcatatttgatgcgcttgcagttatttaggtcagcatctataattaaaactcgtatcatcctggcgtccttccttattggtttgagagaaaaaagggtgggctatgcccacctctaaactttcttatccctatgggctgtaataatggtgaaactatgcgcattaatcgttatgacacagccttctattgtcacataccagtttttaccattccttttgattgcggctttgggagagctggctttcattttgcaccataccaccacatcatcggtatccaaagcgagatttcttctgattcgcatggcgcccaattccgtcgtatgcagttggtccaaatgcagacgcaattcatcgcttttcataattcttgctccaactttaatttgcccaggatgatttcgcagcaaagatcgctttttcattacaatgtaataattttaactaccttgctttcggaattgtcgtttttatagcgataaatgacgatctgcacttcatcagaggctacgccgtagcactctgtttcgttgatcgggacctggcagcaaagataaattttactgtcgtctaacaactttccaatagttccgtctggcagttcgctctccatgttgacatacgcccccggcagctcgcacatatcctccagtgccttaaattcagggatgtccagccctcttaaaatctctataaccttttctctcatcatttcatcctcctgcacatattgattttaccgccaaccttcagtttaggcgtagttaagtcagatcgacaaaccagaaattgttagtccaatgctgtaaggtctgacctttcataacggttatgaccttgcaactgctttttgtagttccaacacttaatggcttcttctaaagatttccctttgttgtccgcaaaaaaatcacgaatataggcattgtactcgaattgcttatcaataacagctgctccttttttcttatctttcataatttgatcgtaagcggctattgcctctttataagttttacccgcgttgctttttagccatttctgaaaagcaacattgaaggaaaaaccatttccaatatgctctttgaaaaaagctctatgcttttcagagcaaacaaagttagattcaattcttgtatcttcgtaaatatttgatattactgtggctcttttctttgtttcaccagaggataatgtctcgcccgtatcaaggaaatgagcaattctgtccgttatttcaattttactaccagaggtaggcagactgttttctctgcaaaagtctatcgattcttctttcaaataataaaaatcgcgaaatgttttgctgtctaggtgcttgtctaaaaccggtctttcagtcatttgcattttccttctaagtttaatttccccagacgaactggaaatgattggccttaacttttctgtcactataatgccgatttacgcacatgaacctctacacagaccagcccagctatatgctccgttgttttattggtcagtaggaaaaacattccgtcattacgacattttttatgtgtaatgccattcaaggtataaataaaacctttcacacaagtatcgctgcaagcatcaggatcaattagtctcttgcagtcacgggaagtcgtcattttcttttgcatatcagcaggcagagaagcgattgtatcttcatacttgccagcatgatcgccgtaaatccgtgcaaaaacacctgacttgcgaaacacccaattcatcactgttttcttctccagttgatatgacgcagcataaccacttttcgcttccttgattacaagctcacagccctgttcaatcagttttttattaagttcctcaacaaacgcttggtgttctggcgcaactgtcgatagaaactctctgaatgaaactttttcttttgccattatcttttccctcctaaatttccatttatcgagtacgccttgtttgccaaaggcatcttaatgatcattttccgctcactgcgatccaaacctccacaagcccatcttttccatagtgttcaatatccggtgcgccggatttcattctgccggtgaggtagcccttattcagcggccggtagttcgacttaggcagccatttagagatggccatggcctctgtttttccgatggtttccagtgtgcaggggaacaccgcccaggtcatggccggaacggtgtattcggccaatccacccggcacgtcgcaatcactggaaaccgcgatcagatactcgaatttccggggatctgcctcgtccgtattataaatgttgatgccgaacaaaccctgcggctcccgattcgccagggccaacagtgctttcaccatgttttccgcctgaaacctcgaccaatgggagggaatcgcctttcgtccctcacctctttgatttgtcgtttgaatcaaagagcccacaacgcggaagctctctcttttttcaatccgaaaaggggtatccattttttatcctcctgcaaacatatttgtgcttttactcatccggaacaggaagccctcaggctgtccgccgtcagcgttttcgcgccgcgcagcatctccagcggcgtacctgtgaataccacctcaccgccgttctttccgccgtccggaccgatgtcgatgatccagtccgcctgcttcatcacatccaaattgtgctcgatcaccaccagcgtgtttccacgggacacgatcagatcaaagagctttagcagattttgaatatcggacagatgcagcccggtggtgggctcgtccatgacgataatgctgccgcgcttacccaagttcttcgccagcttaatgcgctggcgctcaccgccggagagggtactgaggggctggcccagtgtcaggtagcttaggcccacctgctccatccccttcaggtgctttctgatcttggcatcctcgaacacctccagtgcttgggaaacggtcaggcccagcagctccacaatattcttccccttataactacaggcaagggcctcctcgttataccgaacgccgccgcaggcctcgcattcggtcacgatggggtccatgaaggccagctcggtgacaatgactcccttgccgccgcacgccgggcaggccccggcggagttaaagctgaacagactgtccggcttgccgctctcccgtgccagcagcttgcgcatctcatcgaagaagcccaggtaggaggcgggggtggagcggttggtggccgtgatggggccctggtcgatcatcacgacgtcgctctcgtactgccccgcaaacacctgggagatcaaggtgctcttgcccgaaccggccacgccggtcaccacggtcataatccccagcgggatgtccacatccacatgcttcaagttgtggaggaaggcgtcccggacaggcaggctgcccgtcgcttggcggggcatctccttgatgggcaagacttggcgcatggcctgcccggtcagagtgtcggcctggagcagctccgggtagctgcctgtaaacacgatctccccgccgttctgtccggcccctggccccacgtcgatcacatggtcggcgatggaaatcacgtccttgtcgtgctctaccaccaaaacggtattgcccttgtcccggagctggcggaggagattattcatacggtagacatcacgggggtgcatcccggcgcttggctcgtcaaagatataggtcagtccggtcaggctgctgcccatgtagcgcaccagcttgagacgctgggcctccccaccggacagtgagggcgtctcccggttcaggtgcagatagggcaggccgatctcgatcatccggtcaaggccctcgatgatggtctgcacgagaacatccaccgccggattgtatatttgcgacaatacctcccgaagctgggtcagctccatgccgcagaggttcgcgatggaatacccgttgatcttacagcgcagggcggcctcgttcagccgcttcccgtggcagtcggtacactccatttcggcaaccaggcttcgagacttctcctgggtgtgtttgctcttattgctgatgtcccggttcaaaagtgttttggtgtacttgtggtacagcccggtcaccttcgggttctccggctcgcccttgccgtcccgggagccgtagagcaggaggttgtattcctcgccggaatacaaccggatgggcttatccaagtcgaacaggccggactgggcaacctgcttccagtaccaggagccggggcggtagagggagtccttcacacagccctcgttccaggatttatccaggtccagaatcgcctccacgtcaaccttggtgattttccccaggccggagcaggtcttgcacatgccgttggggtcgttgaaggaaaagtaggaggctgtccccacatagggcttcccgatgcgggaaaacaggaggcgtaggctggcgtacagcccactgatggtccccacggtggagcgggcgttgccgcccaggggggactggtccaccaccacggaggccgtcaggttgtcgatgcgttccaccgccggtttcgggtatttcggcagcctggagcgcacgaaggccgggtaggtggcgttcatctgccgttgggattcggcggcgatggtgtcgaagacgatgctggacttgccggagccggatacgccggtgaacaccgtgattttttcctttggaatacggaatgtgacgtgcttcaaattgttctgtgttagaccatgcacaagaatatccgccatcagattacacctcatttcgtttgcttcgttctatcataccatgattgaaaatgattttatcattttggtcgcttaagcggccaactcaccgcttgcggtgggcaatcatggtgtgacaagcgcggtacggcgcttttgcgtcgtcaactcggcttggccaggttccattcgcctttggcgaatcgtctacgcttatcatgccacagcagcagcgcaaccatcagcgtagtcagatagtcggccgtggggcttgcgtataaaatgccgtccattccccaaagacgggagaaaatatggataagaggaaccatcagcaggagcgggcggaggatagagagcagcagggctttgacggcctgcccggtcgccagataatactgggaggacacaacctggaagcctgccacgagcatacccagcagaaagacccgcatacaacggattccaaattccagatacgccgggtcgctcattccaaacagccgcaatatctgagccgggagcaggacgcagcccagccacccgacgacagatacagcggtggcgacgccgaccgctttccgaaaggtctcttttacccggccccccaaaccagctccctggttaaatccgatgatgggctggattccgaccccgattcccacgcagatggagatgacgacggtactgatccgaagtacaatgcccactgcgctgagcgccgcttcgccgctgaccgccccggttccaaagcggacgaccgccttgttgagttcgatttgcaggattgccgctgcaatttgaatcatgcaggccgggagtccaagcataaccacctgcccgcagactgggagcgccggacagaggtgttttctcttgaggcggatgcgcccttttttcaagaagtaaaccaacagaatcacggcggacagaacctgcgaggtcacggtggcgatggccgcgcccttgacgccccagcccaaaacaaagatatagatggggtcgaggatcaggttcagaattgcccctgccagaaaacagcccatcgccagaacgggacttccgtccgctctggcaatgcttgaaagtgcaatcgccgccatgctaaagggggcgcccagcaaaatgataggggcataatccaacacatagggcagcgagccctgtacgccttccgtcgcgccaaaagccaataccagaggcttcaaaaagatgaggcagagtgcggtgaacaggattcctatggtgacagatagggtaaacacggcgcccaaggtcttttccgcttcctcatggttgcccgcgcccatgctcatagaggtatagacgctgccgccaatccccagcagggtggcgacggataacatgatggtgacaaacggaaacgtcaccgtggtggcagcgatgcccaagtagccgacgccctggccgataaaaatctggtccaccacgttatagagggcgtccaccagcatggacaagacggatgggatcgcaaattgcacgagcagtctgctgatcggcgcggttgcaagagggtttccctctccaggtttgatggcttcttccatttcttttctctcctttattgctaaaatcttgatggtttctacgctacagcatatcaaaggaaagaaatttaatcctgatactttttgcgaagttttattcaccggcctgcttgaccgcaaaccacgcctccctaataggagttcctagacccgccccctccaggggataaacctcaatatcggggagcgccgcgtagtccatgccggtggacggaaaaaattctaaatacaaacctcggaacagatccgcaaacgtagctgggcggaacgggtcgccggatgctacacaccaggtcgccgccgggatttgaaactcctccagtccttcgggcgcgggctgatttgtggcggccgctatgtagtagaaaatgtgctgcgggtcgaagtaggtgctgacgcctagaacgccataaggctcctgttcggccagcccgcagatttgccggaattgctctgtttcaatggcctgttcccaaaattgagggattttcaccatattatcctcgtactcttcggtcagtggcattttgaggccgaccacccggatgacgccttttttacgaatttgataccgcatatgcccctccaataattcgtccgcttacagagataaccgttcacggtttgattggtactgcctcaaatttccccgcgtgctctgaaaaaccaaatcacactccagcaaaatgtgcaggtgccgtttcacatagacgatgttgccgccgagttgctccgctatacgcctcggacacatcggcgtgtcataaataatttccagaatgtcccgtctggtcttgttggacagggctgcaaactgttcatctgttagatccacttctaaaatacttttcttcatcaagtaccctccctctcgcaaataagtggtgattcttctcttttatgatacaaaaaccggaatgaacgagcatgatactttttgcgaagtttttggctctggagataaatgatgcgctatggtatcatagaagcaacggaggaggtgccgtcttgaaagaaatatcccctttagaacgggcaatcgaatatatagaaaaccatctgaatgaaaacatcggtctgagcgatgtgtcaagggagacaggctactcctactaccatatgacgcggcttttttcttctgtattgggggaatccgtcggccgttacatcaatcggcgcaggctgtacaatgcctcggaaaagcttatccattccgatcagcgggtcattgatatcgcgcttgactgcgggtttgaatcgccggaggctttcagccgggcgtttaagaccgcctttggcagcagcccggtggattatcgaagggcggggctcgacctggtggtgaacgccaagcgggaactggctcccgaagatgtgggccatattgccaacaacatctcacgctcgcctgaatttgtgatgctaaaggagacaagggtagccggactcaggggaacgacttctctctctgataaccgcctccctggattgtgggaggagttcatgcggctccataaagatctgtttctggccgctggcgcagggtatggcatttgcgaaacgcagcagaccacctatacaaaagatggggacgttttgtttgccgccatggtgggaagccccgtgagtgattttgacaatctggcacaatcattatcattggacaaaaaagttttacgggcaggaaagtacgcggtttttacccactggggaacctttacgaacctgttcaaaacatatcagtacatcttcggaacatggctaccgacagcaggagtggaactggatgaccgcgaggactttgaagtctatgagcgagaggtgctgtcgttcgatgatccaaataatgaggttagaatttttataccagtaaaataggcgtctgtttagcaaaatatgagtttgtaaactcttgtgactttggttttacgagcaacatctaaatatgaacaaactgtaaacgggaacgggacggggcacgttcgcaagcaatggaaaggaatatcctttccgcttgttggggaggtccccaaacccccggcgctcgtcctcgcggactgcatatccttcgcctcgccgcaagcggcaaggctcacagctacgcgctaagagccgggctacgcccggttgcgctctgcacgccgtctgcggacggtgtcatttcgtcgctcgtcctctcccctcgaagtctcacgacttcgcgggggccccttccagcgccttgccgaacaccacgcgggggtgcgacggccccgcagggcctagtgccgaggcttggcctgccgctcccgttggtcgctctccctgcggggcatagcaaaggccggaggccgtgtccagggtctagataaacgggcttgcgcccgccctggacacggcccccggcctccgctgttggctggacaaggggctatgccaaagaattggcatagccccttctttttatgctgggacgcagacaaatagagccccggaaagccgcttgtctcgtggctttccggggctggttttaaggggtgcaagggtaggatacctggaggacctaaatcacggttggaacggtccgcactcaacagtagaccagatcgtccagcgccaattcctccgccgcgtgccggatcctgttcatccgccgcacccacgccatttggtcgcgggccttcaatccttcggtcacgtcctgctgcaccgccatctgccgcgccagtgtgtcgatccgttccaggcaggcctggttgatttccaccagatgatcattcagcgtctcacccagcagcattcccgcataaagccctctgcgatgctccatcaggtaggtccggcgcagccgcccatacttcccgatgtccccctagggccgctctttcaaggtcaggttacgataaagccctgtatttcctctattgtgccaaagtagtatttgccgaaactcgtaaaggaagctgctgcggcatcgtctaattccaaacgataatatggaatgctattcatatttactttctcctggacacaaataatgtgtgatgtagagtttccaatacagtgagttgtgtcgcttttattatacaacggattggaaggaaagtgttacgccacaaatgttactgtttatacccgtagtttttcgtatgggatcaagaaagcagttcttcacatttttcatcgaattaacaaacaaaaattcgtgtaatttcagtagagcaaagcggctccaagctgtttctgacagcaacactctaaaattacacgaatcccaaataattctatattattcacttgttatgtaaggtttcgggagcagtaaaagcgccctcaaaaccattctttcgtcataaaaaacaatgatggtgacccccaaaatgccaattaaaaactcaatgtaaaacaggtcatgtcagaggccgaaaatctaggtgccataggcctttacgggtcattccatcgaagttataaccataaaaattcgtgtaatttaggatgccgcgtgacgaatatgacattcatcaaggtccaaataaggtaattacacgaaccaagtcactaataccgtttatgaccgtcttttatcgttcagttcgtctagtgttgtttcgtccgttttccacaaactacacggtaataaacggtattatatgatacaatttgcacaatcagttggagtaggaaacgaaatattcgaccgccgaattcggaaagaattcgcggaactcgctgcaaagctgggcagccagggttttgttgtgcgcaagcacgagcgtcgggcgctgtacctgttcaatgatattggccatggtgaatgtcttgccggagcccgtaacccccagcagcgtttgttctttatctcccctgtttacgccagccacaagctttttgattgcttccggctggtcgcccgtcggcttgtacggcgctactaatttgaataacccttgattctcgctcataggcattttctcctgtatttatgactcctgatttggccatagccgcaaatttatattcatgcgttcttaagcccatagacacaaaccgcgaattatctcatcgaaccaatcagaacaaatgtttgtattttctatactactagaacctattgtttttgtcaatgctttagtatagcataaatcttctttctttacaaattctatattctttccaattttgatatcgcatcgtcacgttatcccaatcaatgtattcgtctgaggcggctatattcgaacgctccatgccattgccacaagcaggaagcagctcttttatccctataaattccctttcgccagcaatttttaacagccgcccccaaatcgtcaggggcggctgtttccgttactgctcttgccggtccgcgtatgcctgatagccaggcccgggaacgtactttttgccggccgccggaaagcacaccttggccgcgcgcactttccggcgaatcactgctgtgttttcatcgtctgcaagctgccgcgtttcaatttcaaaatcacatccgcctgctttgccagctcgtttgaatgggtcacaacgattacacacttattgagttcatgggcgctttccttcaaaatccctgtgatttcagccgctgtgtcctcgtccagattgcccgtgggttcgtcggccaggataaacggcgcgccggaagccagcgtgcgggcaatggccacccgctgctgctgcccgccggaaagcttcagtacattgcgccttgcttcctcctcggataacccaagccgctccaaagtgggcagcgcgccctgcctggcggtcagctttacgttttccacaggcgtcatataatcaatcaggttatagctctggaaaatcagggagacatggttgcggcggtaatactccaggccgtgcacggcgatattttccccgtcaaaaaggatttccccttttgtcggggaatccagccctcccagcagggacaggagcgtcgtttttccggagccggacggtcccacaatcgcatacatcaatcccgtttcaaatacggcgctgacgccggacagaaccctgtttcctttcgcgtaggagtaaaagacctctttggtttctaaaacagacattgtatttttctcccttcttcagctcattttcgacaggatttccctaggcttcagacgcatgaccgacgccgaggaaataccgaccgaaaggacgataatcacgaaaccgataagataaagctcagccatattgtcaaggcctatggacacgtcgagcggttccactgctgcatttttttgtatcggttccccgccattgccatcgccgttcatcataatatcgccctgatttacattgtccttcatctttatttgcagcccgttgccgtcctgtgggccagtctgctcctgtgtgggctgtgcctgcgcctgcaacaggctgttgccaatctggcccgcgatgagattacttgagaagaaggacagcccgaacgcgaacaccgcaatcatgagcacctccgccaggtactggccgacgacagcccctttccggaatccgatagaaagcagcacgcccgtttcatgaatcctgctttttgcccacatggtcaggatgagggacagcacgacggcgctgaccgccacgataaggatgaggacggtagtgattaaggcttggaatttttccagcggcgcggcggcagcctggtaggttttattgttggtctctaccttaaacgcccgccagtcgatggcctcgttctttttgagctctgaaacaatcccgtcgagctgcgccgggtcgtttacctcaaatacgacgctttgatagcccgccgcggcgtctgagcctgacattaactcctgataagcctggatgccggaaaagatttggttttccagtttatcaaaggagtttacgttggtatatgcctgctcctgctttaccacttcaaacagcccgatgattttgatttcaattttttcagcgccatccgctgttaaggtaatgctgtctccaatgctcaggccgtttttttcggccaaatccttgctgatgaccgccccatacccgccgtccgccggcacatggcttccctcgatgagcttcagagtcccgtcccggaaaaagctgttgtttttcgtgcccgttacacaccggctgtacacccagtccctgtatttgtctttgacgggaaccgtgccgggaattacgtccagatttgtggagacaaggcattgcgccatgccatcgtaactccttatcccggcagtctccatcaccttgtcgattatctcctgggtgatgggcatcttcgtgttaattgtaaagttgccctcttcgtcggtttccatctcgtaatacggattgttttccgagtaatcgggcgatatttcgaatgtaccgcccagcgagtaacgtaaattgtcctgcgtgacccgcgtcgccttctcgatggaaagccccgtcagcacaaaggtcgccatcaccagcagaatgatgaacagcaaagcgcttttgcctctttttttggtgacgtataaaaacgcccgtttgataaagcccataaagaacacctccatatttattgtaccgatagaatagcacgccggtatggaggctgtatgaaacgaatatggagtgggtatggaatgaaaaaaagagacgggagcaaaatattcttttagacaagcaaaccctcctgtaccttttatacaggagggtttgcatagtattggacatatccgctctgcgcacggcgggaaagctttccgctaactgcgctaaccttgcttatacgccgcttgcgtcgttcaactcaaacaagtttccttccgggtctctaaaataggtacagcgcatcccccacgcttcaatgtgttggggtttacccaaaaagggaacgcccgcttctttcagccgccggtagtctccgtccaggtcggccgtgggaacgaccgccacaaccgtgtcaggctgtgcgttgctgggaggctgcgtatacccctgaaacatcggcatcgcttctccggaaaaaatcgcgaagcaaggaggggtgccgctgtttatggcaaaggaggtgtatggaccattccggtcgccccaaacaggaaccaaccctatcttttccgtatagaaatcaaagcattccccatagtttttccgtaccaaaatgcggattgtcgtttcgtcgaatttcattctaaatcgctccttttttgtgttctcattttttgaggttgtatacacaactttattatatatcagaactttgcgatttcgttgtaaaaatcggacatcttgattcgatactcctgaggcgtaagtccgcaaacagatttgaaatcgtggataaaatgaggcaaatcgtagaaccctgtctcacaggaagcgcactccagaggataacgcgtattttgcatgagccggattgccttgttgatacgaaccaagcgggagaatgttttcgtgttcataccgaaataggtttggaacatacggcccaggtgccgttcgctgtaataaacggaagcggcaagctctttacaggagatgtttccggcgcttttcctcaatagttcagtcgcaatttggagctccgacggacatttggcatataaattgtctataaaaatcctgtcgagacggacgaccaattcgtccaagctcccggcgcgttccagcgcgtctaaaatcagcctgttcaatgtggaatggattatttcaaatgaaattctccggtcagccaattctttctgattttctcctgtaagcgcggataaacccgccggttgaaattctatgatgacaagcatatcgcattgattagcttggccgcctaccatgcagggcttggtcatcgggccaaataggttaccgctgaatgcgtaccgatgataagaaaacactaaggtcgcgctcccgtgagggataaccgtatagtcatctgaaatgatttctgtgctgggaaatgtaactgtataatttgaaatttggccacgcagcgccggatgcggcaggatatatacataatcgttttctcgaagcagaatacgattcgtttcatgaaaagcgtgtatgtcttttttaacaatcataattaattctccaaactgggccgccaaccttgtaaaaccctgtattataaatgaatcacaaaccgcatacccggcggcggccccattgggcgaaacgaataggatagccccatcgcttttaagagcgtatcgacaatatacagtcccagcccattcccgccgtcgtcgtggtttcgggcatagtcgggccggtagaagggttcaaagatatgccgcagggcttcggacggaatcggcgtgcattcgttctcaatcaccaggctggagccgtcaaaatagaccgaaatcgttttacccgcttccgtgtaagcgacggcgttcgcgagaacgttggagaccgctttgccgaacctctgcggcggcagttcagcggaaaatccccccgacaaatcctgcttaaataggattttgcgggctttcgctatctgttcatacggctcgcatagctgagccagcaaggatgacaaatcggcttttaccggtgcttcgcgtatcaaagggacgcccagctttgaggtttccaaaatctcctgaatcatttccgacagccgctccgccatatccttacactccggcaaatagacgtcaacattttgatatttcccaatgccgagaatcatattctccagtgtggcgttcagggctgtgagcggggttttaagctcatgcgaagccgcgcgcataaaatccaccttggactgttcaatttcccgcacgcgctgcttttcggcttccaaatttccaatggctgacagcaggttttgatacaagcagttgatgttgccggccaacacgccgatttcgtcctttgtatgaagctcgcaagccgctgttttgtccatccgcgccatccgctcggtggcggctgaaatctgtttgaccggaaccgtaatttgcttggaaaacaacaaagagcaaagaacggaaatcaggatgcagcagcccagcgaaatcggtaaaacccggagaatcatttgcgtgatatagggagtcagattgaatttgccggtgagcgccatatctccagcctcggggctgttcgacagctccagcgggacctgcggggtgaggaaatacagcagcgcatgggccaccaatacgataaacagcagcagcccaagggtatagacaaatgttttcggataaattttcagccgtttcattccctcacctcgtatttatacccaatccccttcactgtgacaaggcaatcgagccggcattttttgcgcaggtttttgacataggtgtctatcgtccggtcgataatgggattatcgtcgccccatagctcgtcaagaatttgatttctagtgagaaccaggcccttgtgctccacaaacagccgaagcaaatcaatctctttgggcgtcagttcaattttcccgtcccaatcccaggccgtatagccggaaaagtccacggttacgtctccgaatgtcatcgtatccggcaggatactttgcccgcttcgacgcagcagcgccgtaattcgtttcccaagcagaatcatagagaaaggcttggtgatataatcgtccgcctgctcgtcaaagctctgcacctgggtgtattcgtcttcaatcgcggttagcatgagaacagggagagggcttgtccgccttatttcatgtaacacggccagcccggtcattttgggaagcatgatgtctaaaactgcaaggtcaatcttcttttctcgaaaaatccgtatggcctctgctccgtcataggccggaaccgtctcatgaccggcggacttcagatactcacagatggcctcgttcgtctttttatcgtcttcagcaatcattagcgccgccataggaacacctcctgctttaggataccattttgatatggaagatatatggaatgcgggattctttttttcgtttgcccatggttttccccatcttttggaatcgttcatacggtacccaattctccgcggcttgttttatagtcaggtaacccatctccaaagcgcctcctgcaatctgctattcttattatatacggaagcccgtatataaaagcaggtcagagaggagctgcccgtgtgcccggagcttacctcttttggcattgattccatcatactgcaaaacaagatgcatttactccaagcggtaccgttctttcatcgtcgcaagcaaatttctatataatcaatgtgattttctagattatatcatatcctaatgagttattgtattgcagaaaacaaaaagtcagagcaataacgctctggcttttgtaattccatgttctttccaatttaggtatcgcgtcgtctcaccacccattcaatgtattcgcctgatatcgctatttcagaacttgccatgccattccggcaagcaggaaaccagcagcgctgacccgtctgcataaaaatctgcgctaaaacagctttgccatgcctaaagagagtgaaaaaccgcttgaaggccatttccgtaaaggaagccgttcagggctttacaggagcagccgactccttcagcagcgtttcaaacgcatcgtatggcatgggctttgcaaagtaatagccctgcccatagtcgcagccgatttcacgcagccgttccagctgttcgtctgtctcaacgccctccgccacaacgcgcaggcccatggtcccagcgatgtccataatatggcgcaaaatgccctggctctttggcttggctgtttcgctgcggataaactgcatatccagctttaaaatatccagcggcagctgattgagcatattgagcgacgaatagccgctgccgaaatcatccatctcaatcaggaattcctgttttttcaaggattccaccgtctcgatgatttggtccgggctttccgtataggcgctttcggtgatttccagcgatagacgtgatacgggcagcccatatttgtgaaccgtctggagaaggatttccgtcaaatccgcgttgtagatgtcggcccgggaaacattgaccgagatatcgagcggcgggtagcccttatcgtcccactgccgcagcatcgcgcaggttttatcccagacgaactggtcgagctttgtgatgaagccgttcttctcgaacagcggaacgaacgtcgccggggataggatgccctgtttgggatggttccagcgcaccagcgcctcggcgccggcgagaacgccgtcctcgagcctgtatttgggctgtaggtagacctcaaactggccctcggacagcgccgccgccatttcgttggtaatggcctgctcacgcagcagttcttcgcgcagcgtgtcgtcatagacggcaaaatattgattgtattgccctttaatgctgtgggcggccagcagcgcccggtcacacatctgctcgaccggaaccgatttgtcttccactgcataaacgccccacttcatcctcacgttttttgtacacgacaggtcattgattcggccagtaatatcggtaaataaatcccctgtgtacgcaaagccgcgttccataacgcaggcgaattggtcggcgccaatccggccgcaaaaaccattccctcccacaaactcctggcagattttcgcaattcccttgagcaggcagtccccggccgcgacgccgaatacgtcgttgaccagcttgaagttttcaacgttggagcagacgaggtcgtattccttttccggcgaatcggcgagggtttcctttacacgctggtaaaagtattccttgctgcatacgcctgtcagccggtcgtaccgcagctgattgacgatggcggcgttctcccgcaggcggatcaggcccgcgacccggtggcggataatctccggccggtagggttttgagacgaagtcggtcgcgccgtgggacagggcctccacctcgtcctcttctctgctgctctgggttgtgacgacgacgggaatcagggagtaggcggcgtccgccttgatacgtgacagaaaggcgtacccgtccatgaccggcatgacaatgtccagcaggatgagggaaataccgtccttctgcgtttgcagcacagaaagggcgtcctgcccgttctccgcctccagtacctcataatccgaagataggatgccttttagtatctcccggttaagctcgttgtcctccacaaccaggatttttttcgttcctttctttgagctcccattttcgttcccgcctaccgacatgctttgggcgcggtaatacgcctgcttgtatgcatacatatggtcgtcggcgcgcgttatctccttgtcggcagagattttcccgtccttccaggtacagccaatcgacaccgaataatccctattttcttcaaagacacggcgcagcttttcggttagcgccagaaaatccgcctgtgcgatatcctcgcaaagcaccacgaattcatcgccgcccacccggtaagcgccgctttccacatgggttttcagcaattccgccacgttttggataacccggtccccatattcgtggccgaagctgtcattgagcttcttcatcccattgatgtcgatgtaaatcacgcccagcgcctgcatatcgcattgggaaagctgtttgagcgcttttatgtagcagttgcggttgcacaggccggtgagcaaatccatatagctcgagcgttccagctcctcaaccagccggcgccgctccatttcgtccagcacaaagccgcacacactgcgaagcagggataaatcgtccccgttttccgtgggattgtctacaccgataaacccgatgattttccccttttttgtcaagggcgcggcagaaaggctttcgattccctgcgcttccagtatgcggtaatccggggagtccaccgccaaatcccgtccgagcgacgtgatataaaattccccgttgcgttcgaatttattattccattccgcgatgtattccaaagggatattctgaaggttctcgatttcctgcgagatgccgggggcgcaccattcaaacgtattataaatggcgtcttcaccatactcaaagatgtaagcccggtcagccgcgtaaaaacggcctatcagctccaagaaccggttcaccgctactgtgacgtccggttctccggagagcgtctggatgcagtccaccagtgtttcctctacggtaagccggcttgaaacccgggcgagctgttctttttgctcggtgatgtcccgcgcgatttcaagccggcagtttttccccttgaaaggaaccagcaggtcggtaatatccatccatctttgcagcttttcgttgaaatgctcccatcggtaaggccgggcggccgacagcttgctgttggtacagaacggacatggggcatcctttccctgtatcagctcatagcactttttcccatagcattctctggcgtcctgaaacccgtagagggcggctgccgcctgcgtcatatacaatatgtcataggtatccgggtcgctggcatacgccagcaaattttgctgaccgataatcatgtgctcaaaataaaaatcgctcatcattattcctcctggatattcaaatcgccagctttccttatgtggaaagccatttttccagcacccggcgcagctgctccaaatcgaggggcttcgcaagatggccgttcatgcccgcgtcctttgtcttctgccggtcgtctgcgaaggcgttggccgtcatggcgataatcgggagcgttttcgtatcctccctgttcagcgcgcggatttgtctggccgccgcgcagccgtccatgaccggcatctgtatatccataaaaatcaggtcataggttccggtgggggtgtttttcaccatgtccacggcgatttgaccgttttccgccgtgtctatcgccacaccggtttccgacagaatctccacggcaatttctctgttcagcgcattgtcctccgccagaagtatccgccggccttcataggaaccgccaatcagcggaccggcttccaggttctcttctgcggcgccgcctatgaactgctttaatttatatacgagccgggaccggaacacgggttttgtgataaacccgttggcgcctgcctgccgggcggcgtccatctgctccgacatgtcataggccgaaagcatgatgattggcaggccgtttccaaccttctcccgaatcagccgggtagtttccacgccatccaggcccggcatccgataatcgagaataaccgcgaaataatctgtccccgcggcatgtgccgccgttaccctggcaagggcggtcctgccgtcgccaaccccctccgctgaacttcccagttctttcaggcgctcgcaggtgttctcacaggcaatcatatcgtcgtccactaccagcaccgacaagccggccagcgcgccgtcctcgattttttcctcctgtatcttgagatagaccgatacggtaaacctgctgcctttcccgtaggcgctctccaccttgattgtaccgcccatctgctccgcgatttttttgcagatagaaagccccaaaccagttccctgaaccgcctggattttcacatcctccgcccgttcaaagggctcgaacacatggtttaggaattcaggcttcatcccgataccggtatccgtgacgatgaattcgtaatgcgccatatctgtttcgccggcgggggtttccctgatttccagagaaacgctcccgccctcgggcgtgtatttcaccgcgttcgacagcaggttcacaatcagctgctgcaggcgctgcacatcactaatcaccgtctcgtgggtaataccgcagacgtacgtgttaaactggaggcttttgtcctggagcagaggctgcaccatggtgacgataccctgcgtaagctctgccaggttcacttcctcctccgccagcagaatccggccgctttcgattttggacatatccagcacctcgttgataaggtcaatcaggagcttggaggaaacgtcgattttctggaagcagtccagtacccgttccgggtcgttaccatactttttgccgattttggtcatgccaagaaccgcgttcatcggcgtgcggatgtcgtggctcatccgggacaaaaaatccgacttggcccggtttgcgtgctctgccgccgtgagcgcatcctgcagggccgccttctgttcggtcagctgcttttgcatttcccgcagctcagtgacgtcggtagcgtcgatgaaaaccgtcaggtagaccgggtcgtccgcaatggaatcggtgcaggtactgcggatttggaaccaccgcttccggtcattccggtccttcatgcgcagcatcccctcaaagggctcgccttggcggaaatgcgggtggtttgccttaatcaaggccctgctctccggctcaagggaggcgtagacgtcgaaggattccagcttatccatatccacatcgaaaatatccgtgatgccgtcgctggcgtcaatcataacgattttattttccaggatgcggtgcttgacgataaagcccgggatgttgtcgtaggcaacggctttctcctgctgaatctgcatcagctcgttgacgtcgaccatagtggtataggccagctgcttgccatcctgatactcgtccgtgaaaaagcccgtcattttgacccaattggtggagccgtcgggaagcttaagcggaacaaagagctcgtagctcgtttttcccgccgcatacatttcctctattttgccgtggattttcttccagccgtcctcgttggtcttaaaatattcgtcgcagtggttgtggaaggcggcctcgtattcctccctggagtacccaatcagctcataataaaaatcgttggccccgactacagtaaaatgctcgtccaccagatggcggctgacgccgacacgcatggcctgcatcagcatctcctgctcgtttttcgtctggaccagctctgtcacgtcagtcatgaccgtgtatgaggtacggaagccgtcgatatattcctccgtaaaatagctgaacagcttaacccaataggtggagccatcttcgtatttcatcggaacaatcagctcatattgatcgccgccctgctctaaaacctctgtgaccttttggctgagtatctcccaaccctccgggttgttctgatagtattcgtcggcatggttgtggaacaacgcttcgtatttttctttggagtagccgatgagccggtaataatactcattggcccgcacgcaggtatagtgttcgtcgatgaggtgcttgctgacgctgacgtttaatgcgctcatcagcatatcctgctcgtgggtcagcttttcaaattcctgccgtgcctgcatcatttcggtcacgtcggtcagggtggtgtaggcgacccggcagccgttaatatattcatccgtaaaggctgcttgcagctttacccagtaagaacccctgtcgggatggacgagcggcaggtaaacggaattaccgctttcccctttgtccagagcgtcctttacggattccgccagaagccggaagccctccgggttattctcaaaatattcctccgggtggttgtggaaccgggcctcaaattccgcctgcggatagccaatcaggtcgtaaaaaaagccgttggcccagacgagcgtgaaatgctcgtccagcagatgcttgctgacgctgacgctcagcaggcgcatcagggtgctgtattcataatcagcagccgactgcatttccagccaccgcgcgcgctcctctttttcattaggcatttcctgcgcctcctctattgggcagatgatttcaaagagtcctttgtatgtatgccgcagcttttcataggacgaacgccacggccttatgctgttttttcgcagcagggatacggtttccgtacaggcgccgtacagcggcgtcaggccgaggttggcccccgcgcccttcaaggcgtgcgccggaaagcggccttccagccgttcgtctgaagcgctggctcaatctgtcaaaggtatccgttccgcgggaatttcagcagaagcttccggtacagggcgctgtttccggaaaacgccgcagcgcgtttcatatctgctcacgtttccagcagagccgcagccacgccgggtctatattaaaattcccccgcccaccttgctcattatcacaccagtttattatagcagacgcccacgaaaaaagcaacattggctggccgccggttgtcacatgtggattcccgcgtaaatccatgctataataataaaaattagtatttcttccagctggccaaggtggtcaaaatatctgcaaatacgcatggctaccaggtttatgataaaacagattatagacaatatgtcaaaagggtaccctgttcggcgcacaagtgaaacgaacgcttaataagaattgttaaaataatatgcggctatattcgatacatataagccgaaggattaggattaagaaaatatggagtgcatttggcggaaaaggcgagtagtagatgatttctattttgggagtagagaatatgataacaggatactattgtacaaatattttttctgagcaggcaaaagaacttattgagttttataggcgggtattagaaatacccgttattaaaaccgatgcagatgattcaaatggggtttattttggctttatagaaaacgcgcccactctctgcatatgggattgcaaagcatggggcgcacagccaactggacatcaatcctttgtttttcaaacagaaaatcttgattcaacaatagaaaacttaaagaaaaaagggcttctgctctctgaggctattagatatgattggggaacttacgaggttcgtttaagcgacattgacggaaatgagattgtaatagttgagtttgtgtaatggtcagcttccagtttggtgattgcctaaatggctggcgttgaagcgcgggagagcagatactggcatatcccgcagcacgcgttgagggaaccattaaatgcaaggctgccgtcaccgtcatggggcttcgtttcttcttaaaggaatatgtgcctgaagcatgatgaattcatccaaaaaggaggacgcgcggtgcaaaataacagtatgacggaaatcatctacgattatttttcttcccggattttattcggctattttcttccgggagaacagcttccgtccatccagtatatcagccggcagtttcaggtgaaccccctgaccgtccggacggcgcttttgcggctgcgggaggaaggcgtaattgaaaccaccgaacgcaagcgcagtaccgtaacctatcagccggacgagcagcaggagcagcggtaccgggccgcttttttgtcccgcagggagggtatggacgacatgtgccggaactccgggattcttttcgacccaattgcccggctctgtctgcagaagcaaaccgaggattctatccatcaaatccggtcgcagctgaaaaaacggaaggggcatccggccaagcaggtcaatatgttctatgctgaggccatgcggccgctgaacaatcccctggtacttaatctgcactgggagatggtccggtatctccggacgccgtatctgcagcatcccgcgaattttgacgatgcgggcgccgctgcgtcggagcatatcgaacggatgctcggccacatagaagccaggaacgtggaaaaagcggtagaggccatgcaggcttttgacagggacgtcatgcagcgcttctttgcgagcctggacgttatgctggacgcaccggagccggtggagcaggtccggttcgaatggcagatttacagggagcacccgcagctgtgctacacgctggccgcagagctgatgagcaaaatcgacgcacgggtttacaagcaggaggcgctgctgccctcctgccaggcgcttgcgcaggaatacggcgtatccctgattaccatgcggcgcacgctggagctattaaacgacatccgtgttaccgaaacgcaaaacggcgtcggaacccgggtgatttccggaagactggccggcccgcccgatctttctcatttacaaatacgcaaatccctgcttataatgctgcaggcgatgcagatgtgcgccctgacctgcaaaaacgcagcggtacacaccttatcctcgctggacaaaaggcccttccaggcgcttgaccgggaaatcgggcggcttgcggaggagggcatggagtttctgaccgcgaaaacctgcctgcggttcatcggaaaaaacagcccctcggccttcatccgagaggtataccaccagctttgccagctgctgcagtgggggcacgccctgcatatgttctctcaaaagctggatgccagcgggttttacggagcctatgtcggaacgctgagggaggcccttctttgcggggacatcgaaggcttcgccgggagtctttcggagctgatggagaatagcgttaagggcgccagagcactgcttctggagcttggctttcgcggggaacagctggtataggcgaaaaacaggaaggtggaacaccggtctgattgacgctgacaatataagaaccgtctgaattatcagcagcagcgcaatacaaaaatttgatttactggcaagtgcaaatcaaagccttggactagctgttaaattgggacggccattatgatacaataaagcaaagacaggcgcggttctatggagctgtgcctgtctttgcttatatgcagaagcaacggggcctgtttcaaattacttatcgcggcatccgcttccggcttttgccgtttgcgtccgattcggcataaaaaagcaaagtccaattttcccctttcagcatagaatgagaatgcggtttctttgcgaaaggaagcgatacatatgctggaatcgaaaccggcgccctgtttaaaacgctgtctcggcctgcgtgaatccattaccatcaccaccggaacggtgattggggtcgggctgttcaccgttggcgccaatgtggtcggcttgcttgggaacactgtaattttcgccacgctggccgccctgctgattagtatataccccgccctgctttacgcagaaatgggagcggcccttccattttcgggcggcacctaccaatacgcttcccttggcctcggcaggcctttcggaatgctgtcaggctggtgcttcattatatccatggtatcagtcgccagcggcgaagcgcttgccttcagtttttatatacgaacccttctcgaagcgctgggcgtccccctgccggttgacgaccggtggatcgcctgtgctgcggtggcgggattcctgctccttgccgtacggggtgtagaaatgaccggacggatgcagaacgggtttctctttttcttctggggcgtggccgtcgtttggattctctccatgctgcctgccatgcactttggcggcgctgtctccgttcccaatcccgacagcctcagcctgaccgggttccttccctgtgtcgccatgatttggtggtgctttgccggctttgaaacctgctgcgccatgggtgaagaaatccggcacccacagattaacctgccgcgcgcgctgtttttggcgccctttcttgtttttgctgtaaacggcctgttccaatgggcgctggtgtgtatagtcccagccggtagccttgcttccctggcggatgcggcagcaccctatgcggagggcatgaaactggcgggggcggtaggctttccgctgattctgctctgtctggggattgccttcggaggagatttttctaccctcaacgccagtgtttccgccccggcacggtatctgtactccatggcgaaggatggagtgcttcccggctgtcttagcaagctgcattcccgttttaaaacgccggtattggctatcctgctcctgggcgtgcttatgatgattctcatcacgacggattccctgtctgttatcgcttccctttccctgtttgcgaccctgctgtattatgtaattggtatgctggctgcttgcggactcaggcggaaacgccccgatttaaagcgcccgtaccgcgcgccgctgctgtggataggcgcaccaatcagtatactgatttatctgcttttaatggcccagcttgacagaaccgccgtgattgcgggcattctctggtgtctgctgggattggcgctgttcggtatatgcaggcgtaaataccggctaaaaagccgcgagccctccctccccccataccctgagccgcccaccccggaggaaaggcgaaagctggaccgggagtaccggatatggcttgtaattgttgcggcggcagctcttttggtattagggctgcacctcttttccctgttctgacatacgttttatccgccccgcatatgtataaagcagcaggccgttttaaattaaaccgcctgctttataaaatagcgggaggggaaccaatggcaaacgacagacggctcacggaaggaaatccctttaccgccctgctgcgcttttccctgccctttcttctgtcgaacatcctgcaggcctgctacggagcgtccgacctttttatggtcgggcgcttttctgattcaatcggcgtttccgccgtcgcgaccggcggacaagtgatgcagactatcaccggcctgtccatcggcctgacaacaggcggtacggtgctgattgggcgttatttcggcgcccggcaaaagcaggatatcgcccatgcagtcaaaaccatggtcgccgtgttcggcgccatgtccctgctgctcaccgccggcacgctgctgcttctcgaccctgtctgcagcctgatgcaggtgccttccagcgcgctggaagccacacggcagtatttatccgtatgcgcctgcggtatcctctttattgtggggtacaatgtcgtcagcggtatcctaagggggcttggggattcccgcaccccgctaatccttataacggtttcctgtgtaatcaatgtttctaccgatttactttttgtcggcgtactgcgcatgggggctttcggcgccgccgtttctacagttatcgcgcaaatcatcggccttttactggctgttatctacttaggctgcaagggccttttgcgcagataccggcgctgtgaaccctgttttcgattgtacgcggccaaaggcgtgctggctgccgggcttcccatcgccttacaggagggactggtcaatgtgtccttcctggttcttaccgccatgataaacagcctggggctcattgcctcggcgtcagtgggcgtggtagaaaaactcattgttttcagtatgctgcccaccactgctttctccgccgcattatccgccatgacagcccagcattatggcgccggcctgatgaaccgcgcccggcactgtatgcgcctgtctgtcgggctgtccctcgttttcgggatagggtgcctgctcctctcacagtggaacgcgccagggatggtcggtttgtttacaagcgacccgcaggttgtcgcgcagggcgcgctgtacctgcgctcctacagcctcgactgtgtgctggtctgcttcgtcttttgcatgaatgcgttcttcagtggaggcgggcatacgctgttccccttgattcacagccttgtctccacctgcctggtacgtattccattgtcatggctgctcattcacgcggcgcgcccatccatgctctatattggctttgcggcgcctgccgcttcctttctctctgtactgctctgccagtggtttatctccgtacattatccaaaacaaaaaagggcggcgggccgcagctttattttgcccggggcagcgcgtaatcccgcagcaaaattatctgcccagcataatcgtctgaagctctacagccgcttccagaaatgaacggctggtatgggggcccgacaggctttcgattgcctgaatcagccgtaccgcttttttcctagtccgtttaccgctgtggatataggcgttcaagctgggcagcatacgtgaaatatcgctttggaagagacaatcgctgtccaaattctgtgacaggcggataatcaggcactgcagggcgggcaaatcccggtacagtgcctccagtttatgattgaggcggattttttcaattgatgagatggtaatgtcaaaaatcaagaaggtaagcatagcttccagaagaggcggaaccagcccgtccgctatcatatgatggacaggcgaaccgatgagcacaacagacggcagctttccggatagccgaatgcaggtggcaaggacacagagcagccccataccgaaatacagcgcggggcggcaccgcatcaaaagatgcagcacaatcacccaaatcaggaaaagcacgtaacggcaggcataggtaaggccatcctgaagccccgccagccgctcgctgaaggtgaacagccctgacaggctggtcccctgcccataaagatattccatataggccgtattctcctctaaaatccccgccatttcccactgctctttcgtaagctgttcagcaatgccggacaagctgctgtcatctgcaattcccggcaatccgcccggaacgccgaaccgtttgttcgtatcatcggaaaaataaatgttaccggaaaactgcccgtctgtggcatattggaaaagaatttccgtttgttcccgttccagccaatgataaagattgccgcccaaggtatcggacagaaaaaaggccaggaaaaaaagcgagacggccgctaaggcttttataatttttttactcatctgtgacacccacattccgcaaaataacctactgaatagtatgggagcttacggcatgattaaaccgtatctcggcatggaatgacggcaaaaagccggcacagccaaagctgcaccggccctcacgctactgcgtataccaaaaaaatatgatttgaatgccgccgctttttatgcggttacccgcttgagcctgcccttgccgctgtggtacaaagccgcagctccacagcctttatcgccatcatttcggtatttattttaaacaggcactgtgagctgccggacactgattccctgcgtccacaggcgggcatacacatccctgcattttttatattgctggaatgtcctgattgcttcacattcgttgttatataccttccagcatccggtacacttggcgttttttccggcgttttcaataaagccttttacatcctcaagaggatagccaagaaatataccgatttcatgcggaaagctatcttccgtacaaagccgctgcttcagcctttcgaccgcgtaatccgtgccaaacgcccggtatccgtaacccgataaaaagcgctgcacctcaggttttgttaattccttttcaaggcggctggtcctgcagacatatacaagcgcgccgcgattgcaaaaccgcaggatataaagcgtaatacccttttccccgagctcccggttccaccgctgtgtttgttcaggtaaatcgtccgcctctgaaagcggcaaattaaataggctgccggttttcagcgaggcaagcgtcggcgcgcagtggtcgattaaatatttctcaaacaagcggatgacccctttttaagcggttttgcagcgctcggacagcacattacgcaaagcacaggcgctgcttgcatgtacgtgagcaattgggattttattccgtttcgcctcctgggacgcgctgacggccatcttgtgagaaaccgtattggtaaataaaatcaaaaggtcggggcagcccatcttttttttaagcgaaccgctttccttcgtgaaaaccttcgccttgcatccgtagcacttacaaatatttgcatactgacaggccattctctcattcccgccgataattacaacacgcataattatcatcctttctttcagcaaaattattcagttagcatcaactaactatattttttataaaaagcggcgtttttatgcccggcagttttcataccgggcagaacgccgtttcatgaccgattttattttatgccgcggtaaattcatttggaaagtaagcaatagatagtagacagaaaaagagaattaaaccgactgattaatgcaaaattgaaaggcggtttttcacccagtttgcgaagaggtctaacagagttgaaatagtgtataacatcagcgacggcggggcgtgaatcaaatcgcgccccgccggtttttgccttgcggcaggcctttatcttttatggcatatacccgaagatgggcagtggccgcagccgcagccacatgaggtttccccctttttcttattgcggattagcttcacaacaattaaacaaacggctgccgccacaatggcgccgatgagaatggaaccccagttttccgctaaaaagcccagcatgatgacgcctcctttattatcatactttcaccttagccttgagcgtcgtactctctttataagggcgcagcagcataaacgcaagcagcgcagcaatcaggaaggccgcaattgagccggtaatattgccctgcccaataaacagcataccaagctggtacactacaagggcgattgcatatgcgaacacgcactggtaagcaacagcgaacagagtccactttgcgttgttcatttcccgcttgatagcgccgattgccgcaaagcacggagcgcacaggagattgaaaatgaggaaggaatatgccgcgagcggtgtaaacacggttctcatatttgcccaaatctgccatccgttctccgctacctcgtcaaacccgccgaagagcacgccgaaggtaccgacgacgttttccttcgcaatcaggcccgtaatggttgcaaccgcgctctgccagttgccccagccgagcggggagaaaatccacgcaatcgctcctccgataacagcaagaattgaatgattgaggtcttccaccataccaaagccgccgttttcaaatccgaaagcctgcaggaaccaaagcacgattgccgaaagcaggatgacagtacccgcctttttgataaacgaccacgcgcgctcccacatggaacggagcatattgccgacggtcggcaggtggtacggcggaagctccatgacaaacggggccgggtcgcccgcgaatattcttgtttttttgagcatgataccggaaatgataatggcggcaatgccgatgaaataagcgcttggcgctacccaccacgcaccgccgaacagggcgcccgctatcagcgcaataatcgggagctttgcgccgcagggaataaacgtcgtagtcataatcgtcatacgccggtcgcgttcgttttcaatcgtacgtgacgccataataccagggataccgcagccggtgccgatgagcatcgggataaacgatttgccggacagaccgaacttgcggaagatacggtccataacaaaggcgatacgcgccatatagccgcacgcttccaaagcagcaagaagcaaaaacagcacgagcatctgcgggacaaagccgagcacagcgcctacgccgcccacaataccgtccaaaatcaagccctgcagccaatccgcacagttgattgctttcaggccttcttcaagcagccccggaaggcccggtacccagacgccgtaatttgcggggtccggctcttcaatctttgccgcttccttataggaagcgtatgtaacgggtatttcttcctccacgctgccctcgtcatcatacaggtaagcggttgttgtgaggcttgctgctttatccgggtcaatccccgccttctctgccgccgcttcaaaagacgcgacgacagcgccctgttccgcatatgcgccggctgccgcttcatactcggccgcgcctatggtaaacaggtgccagccatcgccgaacacgccgtcgtttgcccagtcggtcgcccaggtaccgaccgtcgaaacggataggaaataaacgataaacatgacggccgcgaaaatcggcagcgccgcccagcggtttgtgaccacacggtcgattttatctgatgtggaagccttccccctattttttttcttatagcaccccttaatgatggaagcgatataaagataacgctcgttggtaatgatgctttccgcgtcgtcgccgagctcctgctcggcggccttgatatcctgctcgatatgcccgagcaaagctttcccaatgcctaagccggaaagtaccttttcatcacgctcgaaaatcttgatagcgtaccagcgctgctgttcctccggaagattatgtaccgccgcctcttcgatgtgtgcaattgcatgctccaccgcgccgctgaagctgtgccgcgcaacggttttggggccgtttgccgcctcaaccgccgcctgcgcggcttccatgacgccgctgccctttagcgcggatacctcgacgacacggcatccaagctcgcgggaaagctcttctatgttaattttgtctccgttttttcggacaatatccatcatattgacagccgctacgacgggaataccaagctcagtcagctgtgtggtcagatatagattccgctcgaggtttgtgccatcgataatattgaggacagcgtcgggccgttcctcaatgagatattttcttgcaacgacctcttccagcgtatagggcgacagggaataaatgccgggaaggtctgtaataacaacattatcgtgttttttaagcttgccttcctttttttccaccgtaacgccgggccagtttcccacaaattggttggaaccggtcaaggcgttaaagagcgtcgttttgccgctgttcggattgcccgccagggcgattctaatgttcataaaaatcttcctttccaaatacgataggcccggatacgcgataggttagccatagctaacctatcgcgccaaaaacaattccttttagtctcaaaaaggaactattccacctcaatcattcctgcgtccgcttttcttatggaaagctcgtagcccctgacggtaacctcaaccgggtctcccagaggagcgaccctgcggatatgcactggaatccccctggtaatgcccatatccataatcctgcgcttgacggcgccctccccatggagcttcaccacagtgaccgtatccccgatttttgcctgcttgagcgttttcattttgattcctccctgttgactcaaaatggcttacaccataattttatttgccatttcacggctgattgccacacgggattccttgacattgactatgaggctgccgcccatggctgaaactactgtgacgttccccccggtcacaaacccgagattttccagatgcgcccttatctcaggcttgccgccgattttttttatcatgttttcctctccgatacctgcaagcgtcaatggcatcatattcactcctcgctttaagtaagtcttgtctaacctctaaccaaaaaacaaaggttagcaatctctaaccgtatttatattagcagcgactaaccaaattgtcaagggtatcttccataaattttcaattttttttgaaaaataagggaacaggtttttagtcccgttcccttaaaaagcttaacagcggctcggtgaatttccggctggataagtcgtaggtttgtgaaagcgcacgcgccgcctcttcctcctgcggcgttttatcctgttttttcgacatcatcgaggcaaacatcttcatgatttttttattgaaaaaagacatcttttcatagtctagaccgccgggaaaataaaacaattccaccctctcccgctcctgcggtgttaaattattctttggcaaatccaatgtcaccgggctgtccggcggcatggcgcctacggcgaaagccgcggcctttttatccgcccacgcagggagctgttttttgagccagccgagtttctgcaccttgcccgcctgcacacagctgccgaatataaccgtatcatatttggaaaaatcgacgcggccgcgctgttcaaaggaaacgcattcacaggaaagcgcttcacttatccactgtgcgtaacgctttgtaaagccggttttagaataatacaggataatagcgttcatttttcttcctccttaagctctttgctgaaaaatttctttttgttctgcttacaggcttcatggtcgcatagctcgcatgcaaggccagcgctgcttactttataaaaccgctcggggtgcctgtgatgcatactttcccatacgagcagggaaagtacccccagggaaaacagcagtacagtacataccgacggtaaataaatcagaaagctgtaggaaaaaaagctgtcccaattataaatacggcattccatacagcattccgggtgtaaaaacagcgaataaaacgggcaccagaaaaaaatggaaaagtaaactccaaagttggagagggcaaaaaagaaaaatatccattcccgcccgattacaccggttaagtaaagcgagccggccgaagccatgaagcatagccagaatacgagcaccgccaaagcgcggcggtcgtatttccgttttgtttgtaaaagcgccgtttccgtgcagtctggctttccctcgtatccgtacccaaactgccggcccttatacctgttacggctgaattgcgggagcatatccttcacggggaacgcggcaaaatacacagttgcggctatgtacacccatgtgggcagggaaaacggaagctgcggattccaaataatacagtaaatggagaaaaagaacaggaatccgcttgtaaatagccggatacggttaaacatggtagttcctcacgaattgccgtacatgctccgatagcgcgggttttgcctcctccaagctgtcgcacgtatggattagcataaagggcacggcataaaactccatagcaactgcagccgggtcctcctcccggaattctcccgttttcatgagcattttaaaaatacccgtttgaaaggtgatgggatattcacggtaaagctggcggtaaatccggcgcgccttttcgttatcgaactggctgacggtcaacagcctgcggaacatcacattgtaagggtcgtcaaaaaaatagccaaaggtagaaaaaatcagcccggtgagcgtatccgtatcgattccgctgtacatggaaatatcgtccccatcttcaaagggaagcgactgcctgcggaaatactcattggccttttgaaaacaggtatcgacaatggtgtcgaaaatatcctgcttgtttttaaagtggtaataaagcgagctttccttaatgcccaccgcgcgggcaatgtccctgacggaaaccgcctcgaagcccttggcggaaaacaggcgcagcgcctgttctataatattatcctttgtggtcatatccataccccctatcaatcgttaggtatattataccgaacaaccgttaggctgtcaagcggtaaaaatgcccaggaaaaggataagcctgtcagctgaatggggtttaacactgcaaaaggaacttttttgaatgatgtttgccctttcgtgcaatgatgccgcgcttcgtgcgattatactgcctttggcaatgatgtgtcccgcgggacatagggacaaacattacatcatgccgcagcggagcgaaggcacatcattttgcaaagcaatccatcatttcgccgtaaggcggtacatcatgaaaaatctatttttctgccatcagctatacattcggcttatcctgtccatcatgtttgactatcctacataaaaaagcccagccagtaaatcaggccgggcttttttcattatgccgtcatccgcgtgttttcttttccttatccctcttgtactgacccagaaggccgtcgtattttttgccggtaacgcggtagaaaatttcaaacccaagggtcatcgccgcaaacaccagaagaaagatgccaatgaaaatcagccagcccagcgcgtactgcggcggaaaccagtgcagcgtaagcgcgcaggcggtaaggaccggcaggaataagagcaggaacaggaacaatcgcccggtatagcgcattttcttgataatgttctgcgtaaaacacaaatactggattagcgtgccgaccgaagagataatcaaaaggccgagcagcgttataaggctcgcgctttcctgccccatgatggcggcaatcaacatataaaggattatagttcccgtaaacatatagcaggccgccgtcttccattcaacaacatgctgtaaaaatcgtttcatacttgttttcccctttccagtttgtctagcttttcttttaattccaccgcgtactggcgcgacacatagagcttctccccgttttccatggtaagcagcatgcggccgccgaattccgggcgaatacttctgatgcggcagaaattgacgatacaggatttgcccgcccggaaaaagtccattccggcaaggcgctcttccagctcgtaaaggcgaagcgtgcttttatatacctgcttttccgtatacaggaacgtacgtttatcagcggtatcgatatataaaacatctttgatatcgagcaggcgcagctctccgtcgagttcccctgtgattttctgctcagaaacacgcagcgacgcgataagccgcaggatatcttcgtccgcatgcgggcagtttataatgatttccgtttcggtaaaggccgggtcctggttcagctgtattttcacgttctccctccttctttcagtccaaggattccttacagctctattatacggtgaatatcccccaaagcaagcgattaaaaccgacctgcgggattttactgccaagctgcaaaaaaccgcctgcaaaatgcaggcggccaaagctttttattattttgcagcttaggaccttaatggtacggcgttttccatgtgcgggaagttatacaaatctatcaggccttttcggtccagcccgatgttgaaaattttaacatcctcctgccaggcagttctgatataccaatcccatacgacgtctatattgggcgtccgaacaccgaatacttccgccaaatccttaataattttaagcccaaagggaaagtcggatgtaaaatacctggagtaccagtccggaacccagccgctttccacttctttcattggagaaagcaggcctttaaacgccctgattccgctaatcttttccgtcatagcttttaccgtatggctttcgtaatgctcccgcagagactttacggcgctcaaatccaacgggactttatcacaaagctcctgcagctcccggtcacaggcaatcagcatctcagaggaagcgtccgtccactcctcatagaacaggaaatttctcggatatacgtcgccagcctgatgctccttgaacatggaataaagccgtgtggtgtgtaaaatagaattagaagcaaccaatgttgcagacagatagttttttagagccgcacaaggcatatcgaacaagctttgcgccatactgcaaatatccgcggcctcctctgccggaacagcgccaatctggagctctgcctttctgcctaattcatagacagatttgccgtattccttcaatcttgcaatgctgtgtacacgctgaagcccaaatagcgtacagcccttctcaattatgccctgaaacgcaaactccgcgccgccgctgccgggaacgacgccgattctctggccctcatggacaagcggcgtcatatcccttgctaaatcggcaaacgcctgagcgggaactacaacccaaacgtacccggcgtccgccaaggcttcctgcaaatgatttgtgacttttgacaaaattcctgtaagcaggagctcttcctcagcgttatacacctctattttcttgctccagcgttcaggccgagaagtgtatacagtcacctcatgtcccttgtgagcgaattccgcagccatcaaggtgccaatgtttcccccgccgattactgtaattttcgtacgcggctcactcccttgcaatcaatcaacagattattaaaatttatttctctatcaggatactcgcatatgcgtcgagcgcaatggtatcgccggaaagcgtcccctttttgctgcctgtaaagataaccttgccgcccttggcgtccggcagcttaaccgtggccttctcgtctgtaaagttatggacggcatagactgtctggctgtccgaaacgcggcggtacgccatcacgtcgtcacttccggcgtcgattgcctcaaacttgccctttgagagcgcctcactgttcttgcgcacggaaatcagctttttataataatggtacatagaaccctcgtcttccatttgctcggaaagcgcggtcgtgctctcgtttgaaagcatgtcctcccagtcagtgtccataccgctgccatctgcagtccatttaaacggctcgcggattcgctcgtctggcttttcgccctgcatgccgatttcctccccgtaatagatgtacgggttgccgtcgagcgtcaggtaaacatttgcgacaagccttgcctgctcctcgctgaaggtctgggacacaatgcggttctggtcgtggtttgtaccgaacaccccgtctatatatttgccgtcggcctcgtagtgctgccgctgcacctcctccaaaaagcccgcgagcgaatcagacgtactgtggattgtgctttcgctcttaattgcctgcatcagggtttcctcaaaggcgaaatcgaacttcgtgtcgaacggctgggcatactcggcaagcgcctcgtttccctgccatgcttctccaacgagataaacgtttggattgacttcttcacaggaaatcgcaaactcattccaccatttgaggttctctgccagctggtcttcgatatgcttgttttcgttgtcgccgaagatatgcatagccgcgtccagccggaagccgtccacgccgagctccagccatttttcagcggcggccttgacctccttgcgaacctcttcattgctgtagttaaggtcgggcatcccacttgagaacataccgaagaaatagctgtctcccgatttatgccattcctgggaaccccagggagaacggtcggaggaatcgaaatccgggtcgtcttttgcagcccatgtgtaatagtcccgatatttgctgtccccatccttagaagccttgaaccacggatggttattgctcgtgtggttgatgacaaaatccataatcaccttgatgccgcgcttatgcgcctcttccagcatcttcttaaagtcggcttccgtgccatagtcggaattgacggcatagtaatccgttacgtcgtagccgtgataagagtccgactcattgatgggcatcagccaaataccgtcgataccgagctcctttaagtaatcgagcttcgcggtaacaccgttaaagtcgcctatgccgtcaccgtctgaatcggcaaacgagcggacgaagatttcataataaacgccgcgcttttgctccatatcccctttgtcccgcagcgcataggcgggcttggcgtttgccccggacgacgcggaggaatccgcggaagacggcggctgtgtatccggctgagaggattcgccgccgggcgtacagcccgcaaacgttaaaatgccggctaaaagtattaagctgagtaaaacagatactgattttttcatattctgtaccctttctgtcccaatttaaaaaattgccgcggtcatagtcggccgcggcaatatctatttttattttattcgacttccgcggtgacgcccgccaggtatttctgaacagaaagcacgtcgaccagctcaatcttgccgttcccgttgacgtcggcagccgtaaagaatttacccttcagcaccagcatacccgccatatgcttctgcatctccagaacgtcctgcaggttgatttttccgtcgcccgtcgcgtcgccgagcttcaatggctcgtcggaggttttgagtatgaggctggaatatccgtcgagcgtaacgctgctgccgctgacgcccgattgaccgctgtcggacatgagcgtctgcgcgccgttagcagccgccaggtcgaacgtaatgctgctgccggagaagttatggagcacaagcacgctctcgtcctcggacgtacgcatgtagcccataaccgtctttcttccggtatcgaccgactcgaacttgccgtaggtcagtgccgtgctgttctggcgcaccgcaatcagctctttataaaagctgtacatggaatcggggttatttatctgctcagacagcggcacggtgctgcggtttgaagacgcgctttcccagtcggtgtccatgccgcttccgtctgccgtccacttgaacggctcgcggatgcgttcgtcgggctttacgcccttcatgccgatttcctcgccataatagatatatgggttaccgtcgagcgtcaggtagatgcttgcaatcattttcgcctgctgttcattttttgcgactgacataatacggttctggtcgtggtttgagccgaacacgccatcaaggtacttgctgtcggcggcgtaatgctgctcctgcacgttctgtaagaactcggcaagcgactgggaattgtttacgtttgcgctttccctctgtaccgcgtcggtcaggttctcctggaacgcaaagtcaaacttcgtatcgaacggctgggcatattccgcgagcgcctcgctgccctgccatgcctcgccgacaaggtaaacgtcgggattgatttcttcgcaggcaatcgcgaactcgttccaccattcaaggttcttatatgtctggctttctgtaatatgcttgtactcgttgtcgccgtagatgtgcatcgccgcgtccaggcggaagccgtcgataccgaattccagccatttcttagcggcggcctttacctcttccctgaccttcgggttttcgtagttgaggtcgggcatgccgctggaaaacataccataataatagtagtttccggaacgctgccatacgcgggagccccatgcggacgtatcggacggattgtagtccgggtcgcttggggatacccatgtgtaatagtcccgatatgggctgtttacgttcttagacgctgtgaaccatggatgctggctgcttgtgtggttgatgacgaaatccataatcaccttgatgccgcgcttgtgcgcttctgtgagcatatttttaaaatcggcctccgttccatagtcggaattgacggtataataatccgtcacgtcgtagccgtggtaggagttcgattcgttcacaggcatcagccaaataccctcgacgcccaaatcctttaagtagtcgagctttgcggtcacgccgttgaaatcgccaacgccgtcgccgtccgaatcggcaaacgagcggacgaagatttcataataaacgccgcgcttctgctccatgtcagttttgttcctcagggggtaccccgcggcggcccgcgactcatccgccgtcaagctgccagccgagacgacgattccgcagagcattaaaacggcaagcagcaggcttgtcagcttcttcaatgcaatcattcctttcattcttccgtaaatatgttactcttccacgggcgctggcatatgtaatcctgccgcacgtcttctcctgaaaacgaatgaaccgtttagcgcccttacctttaataataatgaataccatggaaaattgcaagcggatgaaatagcacaataccaacataaaattgaaaaaaagtcagatttcatgccataatatccataaaaacccaccagattttgtgcacaatatatactgtttcttacaacgaaaaattcccgcacgggtgtccgcgcgggaatatctgctaaactaggttaaaggataatacaaataaggccgttgcatccctcgttgataatacgctcgatggtttccttgagcttgttgcgcgcatccggcggcatacgggtcagcttgttgtgcaggccttcgttaaccagctcgttcaaggacttgccgaagatgttcgattcccaaatcttcgacgggctttcctcgaactccttgagcaggtacattacaagctcctcagactgctgctccgagccgacgattggcgtgacctctgtagtaatatttgtcttgagcatatggatagacggcgcggaggcgcgcaggcggatgccgtacttgccgccctgcttgacgatttcaggctcctcgagcgtcagctcttccattgttggcatgacgataccgtagcccgtttcgttcacgtcgttgtatgcgtcgcgaatgcgctcgtattcctgcttgagtgttgcaagctccagcatacagtcgagcattccgccctcgtcgcgaatatcgaagcccgttttctccccaagcaccttatagaacagcgtctggttgagggaaacggaaattttcgcgtgcccctgccccaaatcgatggcgctgacctgtgcgctcgtgacatactcgcacgcgccgatgtcgcgcgtgatatcctgcacctgccggattttctcggcgttctgcgccgaattgacgatagcggtaaagatgctgctccgaagccagtgctccttttcaagcgaggaaacccatttaggcatatcaaccttgatttccttaattgggaactcaaacagaatctgggcaagaattcgcttgatttcgttttcgtctaaatccatacagctgaccggcacgacgggtaccccgtattttcgcgcaagctcagaggcaaggacgtgcgtttcctgcgcgttcggctgtacgctgtttaaaaggatgacgaagggcttgttgatttccttgagctccttgatgacgcgctcctcgccctcttcatattcctcacgcgggatatcgctgatggtaccgtcggtcgtaatgacgaggccgatggtcgaatggtcggtaatgacctttttcgtaccgatttccgcggccatattgaacgggatttcatcctcgaaccacggcgtcttgaccatacgcggctgttcgtcctcgatatagccgatggcgcttggcacgatatagccgacacagtcgatcatcctgaccttgaaggtcgcgtttccgccgatgttcacctcaaccgcgtcctccgggatgaatttcggctccgtggtcataatggtccggcccgcggcggactgcggcagctcgtcgacagcgcggtcacgccggctgtcgtttgcgatattcggaatgacaagcgtatccataaaccgcttgataaacgtagattttccggtacggacggggcctaccactcctatatagatgtcgccgtttgttctgcgggcaatgtcctgataaatatttcgctcttccacagtgacttcctcctttttatatgttgggtatgagcagcatcctgccctgcgctacggtgtcttccgctaaatcgttctccgccttgaccgcgtcgcagcagatgcagtaatcccttgcgatgtcccagattttttccccgtctccggcataatagagtgtgagcgccacactgtcgtccttctggcgcaggtgctcctcgtttgccgacgccgccgtgacggcgcgtgtggatttatgttcaaatacagggaccgacaactggatttccgtgcgcaggtccagctggctgccgtcgcccaggcggtagctgatggaaaccacctgcgcacgcggggccgcgatgaggtttttgatttcgccgtcgaggctgagcggatacgtaaagtctaccgcgcgttccgtatagaaaggagcgtcttcactgtcgagcgccaaaatacacacgttgaatttgccggtgagcaccatcctgccgttttcctcaagcgccttgacggtgcactgctcattccacaggtcgagcattttggtaattccagaggagcttgactccactgtgcttttattgacataagtatcgttaatgatggtcataagccttggcagctgtacctgcccgaaggtaaggtcaaggtcatagacggtagaatacgcgtcggtaacgagctgcgcctcatcctccccataggaggtgactgtcgcgcaaagcttggcttcgagcgacagaatcgtgtcgctttcagaaaggtcgttgcgcacgcgcacgtcgtaggtcatgacctcgagcaccgtatcgcaggaggcgttttcgtcaacgccgtccgcgtcgataatctggttaatgggaatggtataatcgagcacctccacggcgccggtatcgaggtcggcaaggtaaagcaccttgaggttcaaatcacccttaatcatcattttgttcgtgatggccttgcactccgtcaggtacgcctttgcgtccgtacgaagtatagattcgaccggcggcttgccgctgccaagctcgatgtcctcagaaacggtaaagagctgctgcccgctgcccgtgacggtcgtaaccgggaaagacgctttcatcatctgtacgtcgtccccgtcgatagcgcagacgttttccctctccgccttgcttacgaccttcgcgcagacagtaaacgcgccgtggatatcgagccttctggggcttaacgcccggcagttcaagtattccggtttggcgtttgcaaggacgactgcgttctgcggcgtggttttgaggttaaacgagcttgtaaacggcatgacgtgctcgctgcagcgcacagatttttttaccgcgtccacgtaaagaatacgtacgaccgccgcgccgtctacgtcgagcctgtcgccggatacattttttgtgaagatttttggatatgcctggcactttaaaatgcgctggatatccgggcagtagtccggcaggctgaaatcgagatcgatcggctgttccaaacatccttcaaataccgtttcgcttacagacaaagacttttttgacaacgaataatccatatttgtatctctcctttttaatacctgtccgcccacggcgacggtatttgtttctaagctatatctattcgccgccgtattccaatatgacaaaaattaccggcctgcctgacgccatgaattgaaaagaaaaaaggggtgcccggacaagcgccggacatcccttttttcttgttattgcagcaggttataatttttaactcaaattacggtaccagctttgctatctttttctgcacgagcagcacgtcctccagattgatttccccgtcctgatttacgtcataaaggttataatggttaggccagctatctatctttgcaataaaccgctgtatcaggattgtgtctgcaacttccaatttcttgttgtaatttgtgtctcccaagggaaatgcccaataaaacgggttagagttatatataaacccgtctaccatttccgcaactacgccaatatcaattaaaccctgttcgtaagcatccttaatataaatctgttcatcgccctttaccgcgtatagcgccaattggtgttcacttaatttaggtgataagaataaataccctccaatcacttcttcgtactccattattgtaaatagggcgtctatggtacaaatatcatacccgttatttgtaccgaagtagtgatatgcgagataaaaattttcgccccaatcttccgcagaagcagccgttgtcgcaaggctgaaaagcaaaagcagcgacaagattacacatattatttttttcatggttttctccttaaacgcaccttgcttcaaagcatccgtttagtatggtattatttttgctatctttttctgtacgagcagcacgtcctccaggttgatttctccgtcttggttcacgtcataaaggtcataggaatatggtttgtgattaatttttgcaatgaccttttgaatcagaataacgtcttcaacatccaatttcctattaaaatttgtatcacccaaaggaagtactaaataaaaaatggctgagccgtagcggaatccatctaccattttcgcaacttcgccaatatctattaacccctgttcgtaggcgtccgcaatatatatttgcttgtcattttttattgcatatatcgataactgattttcatgggctccgccgtttaaattgggggacgaaaacaaataccctcctattacctcttcccattctgtaatttgaaaattggcattaattacgcaaatatcatacccgttatttgtaccgaagtagtgatatgcgagatgaaaattttcgccccaatcttccgccgaaacagccgttgtcgcaaagctgaaaagcaaaagcagcgacaagattacacatattatttttttcatggttttctccttaaaggcaccttgtttcaaagcatccgtttagtatggtactatttttgctatctttttctgcacgagcagcacgtcctccagattgatttccccgtcctggtttacgtcatacaagttaaacactcttggattcttaataatttttgctaagactttttgaatttgtattgtgtccgcaacctccaattttttattcaagtccgtatcgcctaaaggataaatagagtaaaaaatagagttataggaaaaattatctaccatctccgcaaccgcgccaatatcaattagcccttgttcgtaggcatccttaatataaatctgttcgtcgccctttaccgcatacagcgccagccgtgtttctggagcgcttaaggtgggcgacatgaataaataccctccaatcacttcttcgtactccattattgtaaatagggcgtctatggtacaaatatcatacccgttatttgtaccgaagtagtgatatgcgagataaaaattttcgccccaatcttccgccgaaacagccgttgtcgcaaggccgaaaagcaaaagcagcgacaagattacacatattatttttttcatggttttctctcctttaccgctggtaccagcaaagcgcaatgtccgtgccggtactgagcaggttggtttttcttacacgtatggtataggttcccggtatttccggctcaaacgcaatgtattcttttgtatcgtaccgataccaggaattgtatagcagctcgccgtcggggccgagcagctctaatataaaagtgtccttgccggcgtcctcaacctcgcccgtttcgtggctgccggacgttaccgtgttctttttcagccagctcaggcatatctgcaaacgggagccggcctccacttcgatttcctgagtcagcgggttgttcgtaccgccgaaattcggaaaatacaggtagcagctgtcatataatacagccgccgcgttgataacgttcaccatgcccgcgccgttcttgtgacacaggcccgggcgccagctgccagtcatgctgtcgacattattcgttaaatcggcgtcgctgtcgtaggcttccatttcctgtgtttttatcgcgcccgccaaaagcgccgcctttaaaagggcaggctttgttttaaagtaggagtacataccgcagagctgcgcgacggcgcccgtgacaatcggcgcggaaaagctggtgccgccgccgtaggaattcgtcatagggctgtagcaggagccggcggtcgcgcccggcgccataatatccggcttataggccgccgtattgctgtcggaataagctgattcttgataatttagtttaactatatcacgtttatcatcagataaatcaatggtatggttatcgttgatattcccgacgaggattgcgttataggacatacagccctcagaaatccggtaataattcccggcggatatgcagacgctcacgttgtggctgtatatcaggtggtcgagccatttggcggaatcgtcatatacacccttatcctctcttctccctggcagcgcggtggacgcgttgattacattgaccccttcgtccactaaccgctccatggactgcttccaatatttataggtgcccgttttcccgtcataattggcggcaaaatagaggcttgcattgggtacaatcgcgctaaaatcgtcagattttccaaccataagcgcggccacgcatgtcgagtgatcccaatttctcgtataattgccgtcaaaaaccactttaaatttattgttttcggggtttgcgttatcccgcatgtggtcaaaggccggtttggtaaaatcaggcgcgctgttttcaatctgcccaattttaatgcccgtgccgtccgcgtggttatagatgcgcatattggaaacgcccgtcgtcgtctgataggcaagcgatatattgcttgcggcagctacggtttgcggtgcggccatcgcttcctccatttctaaagcctcggcgcttacctgagtattatagtaaaatatttcctccacgtccgccgagcgcgcaatttcttcaatctggccttttgtaagcgtcatcataatattcggcgcgtacttgcaggaataaatgacctccggctgcctctgcgggacagtccggaaccattcctgcttttccttagggaacaggctttcaaaaacctgtgcgttctgccgcgcatattcctgcgacgtgacctcgcgctttgtttcaataaatccctgtgcgtcctcctgtgaaattgccgcaatatcgaggccgttcacaggctgaaagttcacagctgccagctgcgcgtttccactgttttgctgtttcatcgtctgaaggtcgtcctccggcagcaggagcgcctgtccgctgatttcacccttttccgcctttcgctccagcctttgcgtaacctcctgctccacctcttcataatcaatatcgcacagccagaccgatacgtcgattgtatctaaatcactcatagaatcgagcttttcctgcaaagctgaatctattttgtccgcaggagccgtgttttccgcatttgccgccgataccggggccagcagagccaaagaaagcaaaacaaccgcaagcattgccgcgctgtattttttaaaatccataagcttcctctttcctattcatttccgatttcattaatttttactggtaaacaaaacagtccattggatacaccttcttgtaaaaatttccattattattataacaccagccatttatttcgtcaacttaatcaaaataaaatcatttataacttaattgtacaagtagatggatttctattatattttcagcatacaaaaaagcgccgcttgaagcggcgctttgccttggaataagcaattaattatgcgtttttaatcctgatatactgctctatgatacgcgtgcatttttcaaaccccagctcgctgctgttaagcaccaaatcataattgcgcgcgttgtcccagtctctgccggtataatacttatagtaagcggcacgctcccggtcggttttttcgatgaccttcttcgcttctttttcagacaggccgtacatgtcggttacattccttacacacgcctcaggcgatgcgtaaacgaacacgcgcaccatgttttccatgtctttgagcacaaaatcggcgcagcgtccaacaaacacgcaggattccttctgcgccagctccttgattaccttcgcctggtaattaaataaattgtcgtcagaaacaaaatcgccgctctgcggaggaatcagcttgttgtcctggtatacgttgaccggctttttaaacagtccgcccttaagcctctcgtccgccctgccgaacagcttttcattgatgccgctgtcgatggaggccaatattgggatttccttgtcataataggaaaaccccagctcctttgcaagcattttgccgatggtcttgccgccgctgccataggcgcgggcaatcgtaatcacgaaattcgacataaatcaccgctcctttttactcaccaagataagctttcttaatcgagtcgtcgttcatcaactctttggcgccgccctcgagcacgatattgcccgtctcaagcacatacgccctgtctgcaatggaaagcgccttctttgcgttctgctctacaagcaggaccgtggtgccgctttcattgatgcttttgataatatcgaatatttcagagaccagcagcggagaaagccccatggacggttcgtccatcaggataattttcggcctgctcatcaaggccctgcccatcgcaagcatctgctgttcgcctccggaaagcgtaccggcaacctgctttttcctttcctcaaggcgcggaaaacgcccgtaaaccgtttgaagcgactgctcaatttccgccttgtccttacgcgtataagcgccgagcttcaggttttcgtacacagaaagctcctggaatatcctgcggccttccggcacgtgcgccatgcccatctgcacaattttatgcggcgctgtttttgtgagctctttatccataaatttgaccgagccggtttttgcgggaatcaggcccgatatggtatgcaggatcgtcgttttccccgcgccgttcgcgccaatgagcgcaataatttccccttcgtttaccgtaaaggagattcccttaatcgcctggattacgccgtaataaacctgtaaatcttttatttcaagcattgccataacgcttttctctcctttactcaccaagatacgccgtgatgacctccgggtcgtttaataccttggatgtctcgccgtgcgtaagctcctggccaaaattcaagacagtgacctgctcgcagataccggaaaccaggcgcatgtcgtgctcgatgagcaggatggtcatgtcgaactggtcgcgcacaaagcggatggtatccatcagctccgccgtctcgttcgggttcatgccggcggcaggctcgtcaagcagcaggagcttcggctttgttgcgagcgcccttgcaatttcaagcttcctctgctttccatagggcaggttctgcgcgagatacccggacattgcgtccaggccgaacacctcaagtattttcatggcctcgtcgttcatcaggcgctcctgcttccagtaggacggcaggcggaacacaccggagaacgcggagtacttattgctcccgctgaggccgagctttacgttgtcgagcacggaaaggttattaaagaggcggatattctggaatgtacgcgcgattccgctgtggtttattttttccggcgacttgcccgtaaggttcctgccgtcaaggaaaaacgcgccctttgttggcttgtatacgccggttaacaggttaaataccgtcgttttgcccgcgccgttggggccaatcagcccataaagctggcccttttcaatggtgacgttaaagtcgtccaccgctttcaggccgccgaaggagatgccgagattttttacttcaagcattgccatattcaagcctcctcctttacaagcgctttcttttccctgcggctgcggaaaaacgcctcgacagaaagccgcgatttaaagctcctgaacttctcgtttgcattaagaatcatcatcgcgacgagcacgatggaataaataagcatcctgtattcgtccgcgccccttaagacttcaggcagcaccgtgataattgtagccgcgattatcgagccgcggatgctgcacataccgccgagcacgaccataacgaggatttcaatcgatttgttataatcgaagacagaagcctgcacaatgctcaggctgtggccgtagagcacgccggcaatgcccgcaaagaacgcggcgagcacaaacgcgaacagcttgtaatatgtgacgttgattccaatagacgaagcggcaatgcggttgtccctgacagagcagattgccctgccgtgcttggaatcgacaaggttcataatgacgaacatagttacaatcacaagcgcgaaaactataatatagttcgtgtcctgcggcgtgcctttaagtcccgacgcgcctccggtaaagccaaggtttataatgacagacacgataatctgcccaaatgcgagcgttacgatggcaaggtagtcgcccttaaggcgaagtaccgggatgccgatgagcaggccgaataccgccgcgacaagaccgcccacgagaatagcgagcggaaagcggataaacgcgttcatcgtatcggcaaacgcaatcgagaataagcagcccgcatacgcgccgaccgccataaaggccgcgtggccgagggaaagctcccccagaaagccgacgacaaggttcaaagagattgccaggataatattcagccccacgggtacgagcagcccgcgcagctggcgggtaatcatgcccgactggtccataaagaacacaactaaaaatgcaatcagtacgattccgtaggtaatcaggttgttgatggtgctcggtttgagcatatgttttctcttcatcgtcccccacctacactttctcatcaattttcttgccaaacaagcccgtaggcttgatgacaagcacgacgattagcacgccgaacacgattgcgtcggcaagctcacccagattgaacgccttggcaaggctttcgatgatgccgagcagcaagccgccgaccatagcgccgggtatgctgccgattccgccgaacaccgccgcgacaaaggccttgattccgggcatcgcgcccgtataggggccgatatagtcataggacagcccataaaacaggcccgcaaccgccgcgagcgcggagccgattgcaaaggtaatggtgatggttttattgacgttgacgcccatcagctgggccgcgcccttatcctcagaaacggcgagcatcgccctgcccgtccttgtcttgttgataaagagcgtcaggcaaaccatgatgacgaccgttacaagcagggtaacgattgaggaaccctggataaccaggccgtctgtaattgtaatgggggtcagtcccaaaatattcgggaacggctttttatccgtgccgaaaatcaaaagcgcaaggctttgcaggaagtagctgacgccgattgccgtaatcagcacggtcagcggcgattccttccgcaggggcttatacgcaattttttcaatcgttacgccgagaaccgtacacaccacgattgccagaagaaccgcgatgacgggcggcatgctcatattggtcgcaacaataatggtaaaagcgccgaccatgataacgtcgccgtgggcgaagttaagcattttagcaataccataaaccatggtgtatcccagtgcaatgagcgcgtagatgctgccaaggctcaggccggttatcaggttagataagatgctcatgggtatattccgcctcatttccctccggcgcggtgcgccgggaattcaaactgcgcgcggggctgccgcaaaaataatctgttcaagaattggggccgcacgcgaaaactgtatctacaatataatacaatattttgcgcgttctgcaaagagtatttttgagaaagcctcaaaaaaaattggaaacgggcggagttttcataaaactccgccctattttgcaagattcagtcactcaaaaattaatcgagcgccacgtattcgccgtttacaattttaacagccttggcgtcctttgtcggctcgccgtcggcggtccatgtcatcgttcctgtaaggccttcgacagtgatttccgtcatcgccgcggaaagctttgtaccgagctccttaacgtcgatgcccgcgtccttgatttcagccttttccagcgcggccttgattgtgtaaaccgagtcgtagccgtccgccgcaaactggtcgggggtagcgttttcgccgtaagccgctttatacgcctttacgaagctctgtgttttttcgtccttcgcgtccgccgcgaacggtgtaagcagcataacgccctcagccgcggaaacgttcgccttgccgagcttctcgaagatgccgtcgaggccgtcgcagccgaagaacgggatgttcatgccggccttctgcgcctgcatcagaatggaggccgcttcctgcgcgtaaatcggaaggaatataagctgtgcgccggcgtccttcgccttctggagctgtacgttgaagtcggtattcgtctggtcggtaaacgcctgcttcgcaacaacctcaaggcccttgacctttgcttccttttcaaagttgtcggcaatgccggcggaatagtcgttggacttgtcgtaaatgaccgcgaccttcttcgcgtctaggttcgccgcgatataatcggcggaaaccgtaccctgctgcgggtcggtaaaacagatgcggaagcagttgtcatactgtacgcattccttctgggagccggagggcgtaagcatcaggatgccgtccttctgtgtttcgttggcgaccgcaatgcacgcggcgctcgttaccgcgccgagggaaatcttcattccagcatccatcagcgtgttgtacgcgttgaccgccttggtcgcgtccgtttcgtcgtcctggaatttcagctcaagcttgatgccgtttacgccgccagccttgttgatttcatcgacagcaatctttgcaccgttctgaaccgaaacgccgtatgtagaatagtcaccggtcagggggcctacgccgccgatgagcagcgtgcctccctggtcgccgccgccgctttgcgcgccttcattcgagcagcccgcaaggcaggatgccgtcataaggccggcgacacagagtgccaatacctttttcattggaaacttcattgtgtcaaacacctccataaatttggcgaaatacttttgcatttcgttaataaatatacccaaaccgccaaaaaaagtcaataaatttaacatgtttgttaattttcttttaacaatgaatgtattttcaccatgaatccgtccgttttcttgtacaatttactctctttttccgaaaaacgcccagaaaggcaagtagttaaagcgtggcgtaaagcgcgtctacaaggccgtcaatttgcgccatttgttcctcacgcagcgcagagcgaagctcaagcggcggcgacacgaggcgcatagttttcatattttccaggcgcttttccatttccctgcctgccgccggcgaccacgagccattgccaacaattgcggctgtacggttttgcaggcggagcgcttccatttcatgcataagcgcttccattgcaaagtacagcccgccgttataggtggaggaagcaaggacgatatggctcatgcggaacatatcggctatgatataggaagcatgcgttttagacacatcgtatacgcgcaggttccccatacccctgtcggaaagcttgccggcaattacgtcaacagcattctctgtgttcccgtacatggaggcgtaggcgagcacaacgcccttttcctccggctcatagcggctccagcagtcgtacaggttgaggatacagggcaggccgtcgcgccatataaggccgtgcagcgggcatatcatgctgattttcacaccagccagcttgtggagcgccgtctgcacctgcggcccgtactttccgacgatgttcgtataatagcgccgcgcctccggcaggtagtcgcgcgcaaaatccacctcgtcgcaaaagaggttcccgctgtgcgcgccgaaggagccgaacgcgtcggcggaaaacaaaatgccctgggatttttcataagacagcatgacctctggccagtggaccatcggggcgaaatagaaccgcagcgtatgcctgccgagcgcaagctcgtcgccctcacagacctccataaaacggttttcaaaatcaaatgaataaaactggcgtatcatctggaacgtcttgtggttcccaacgattttcatatccgggaacctccgggcaagctcctcgagattggcgcaatggtccggctccatatggttgactacggcgtaatccagggcgcgcccgtcgagcgcggcgtcgacgttttcaaaaaactgccgggtaattgccgaatcgaccgtatcgaccagcgctgttttatcgtctaaaattaaataggaattataagccacgccgtcgggcagcgggaacatattttcaaacagcgcgagcctcctgtcgtttccgccgacccagcagatacctggtgcaatctctcttttatatctcatttttaatctcctatacagcgcttgtttttctataaatataaaaaaattataaaaacatttttccatacgggcgctgatttatgcggaggggacggtatctccgatttttcgacgcgcggacgcgttacagcttttacctttgcggattctattgacacgattcgtttttgccgttataactaaagcagggctttgcctgacaaacagcaaatataaataatgaatcatatggcaaaaaggaggcgcttatgtcacaggcacttttatgggcagccggaggcaccggctttaccttttttatgacgacgctcggcgccgcggttgtctttttcttccgtaaaaaagtaaacatcggcattcagcgtatttttctggggttcgccgcgggcgttatgatagcggcttccatctggtcgctgctgattcccgctatcgaccaggctgaaaaagcgggcgggataggctggattcccgccgcggggggctttgtcctcggcattctttttttggtcgggctcgattcccttctgccccacctgcatcccggagcaaaagacccggagggcgttccctcctcttttaagaggacgacgcttctcgttttcgccgttacgctgcataacataccggagggtatggctgtcggcctttcgtttgcgctcgccgcgcaaaacggaggcgacccggcgctttacagcgcggccatggcgctcgccatcggcgtaggcatccagaattttccggagggcgcagccatctctctgccgctgcggcaggagggcatgaaaacgggaaaagcctttgccatgggcagcctttccggaatagtcgaaccggttttcgggctgattaccgtgctcatcgccggaagcgtcgcctggctgatgccttggatgcttgcgttcgccgcgggcgcaatgatgtatgtggtcgtggaggagctgataccacaggcgcatttgggcgagcattccaatatcgggacgctcggcgtaatggcgggctttctgctgatgatggtgctcgatgtcgcattgggatgacttcaggaacatcgagaaaagggcaggctgtgtgcctgcccttttttgcgccgcatgcaggatatcaatattcttctttccccccaacgttaattgtgctaaaataaggaaaatcaaaccgttggaaacagcagaaaatggaggtatgaatatggaaacgaaccaatacctaattgacctttacaacaattacgacgaggacagcaggctggttacaaagcacggctcggtggaatttctcaccacaatgcgctacatagagaaatatataaagcccggcgaccgtgtgcttgaaatcggcgccgcgaccggccggtattcccatacgcttgcgcgccggggatataccgtcgacgccgtggagctggtcgggcataacatagagattttccgtaaaaacaccctgccggacgaaaatataaccataacgcagggcaacgctgtggatttgtctgcttttccagacaaccaatatgatattacgctgctgctgggccctttgtaccatctttacagcgacaaagacaagcggcaggccctgagcgaagcaatccgcgtaacaaagccgggcggcgtgatttttgccgcgtatgtcatatctgacggatgcctccttgacgaaggcttccaccgtggtaatatcagcgtaatggaatatattgaaaacggcctgcttgacccgctgacatttgccgccaaatctgagccaaaggatttatttgaacttgtccgaaaagaaaacgtcgatgaattaatgtccatattccccgtaacgcggctgcattatattgcgtcagacggctgcgccttatttatgcgcgaagcggtagacgcgatggagcaagataagtttgagctgtatttgaaataccattttgcaacctgcgagcgtgaagatttattgggcattacgagccacgcggtagacatattcagaaaataaacaaccataaaataacggcatggcactgtgctgtacagcgccatgccgttacctgtatttctcagaaacaagccattttttcgcttgttcaaaatcgtctataaacgcaaaggcaaacccgccgccggagactgctttccttattttcgccctggcctttttgtctgtgcctacaaagacagcacgcgtaaaccgcttgctattatccagcagcttttcggccagggaacggataagcgaatcgtctatgtacgtgtggtccaggttgaccgctatcagcgacggcagcgacggccttttaaactgcaaataatcacgttccagcttttcaagcgccaactctgtgtaatcataaataccgtccagatgctcgaaccagatttcacctccgtcaaagtacatggaaaacgactttttctttacgcctggaagctcttccccccgcatgccgtcaccccctttgattctgtcagccggccgggctgagaaaaagcgcttcaaactctttaacaggaagcggcctgccgatataatagccctggatatagtcgcacccgaggcgctttaacaccttcatctgctcttctgtttccacaccctccgcaacggttttcatattcaaagccttcgccattcctacaatgctcgaaataattgtctggttgcgcagttcaaaaagctttttattgctgaaaaacatcatatcgagcttcagcacctcaaccgtaacgtccttaagcaggttcaaggaggagtagcccgagccgaaatcatccattgaaaagcagaagccgcggattcgcattttccgcatgacgctttccaaaagctctgcgttctcgaccattgtggtctccgtgcattccagttcaagcaggccgtccggtatttggtagcgctctttaatttccgtatacctgctgataaaatccttgcgcagcgcgctgatgcgcgaaacgttgacagacagcttaattggtgattttccattttcgagcaggccgtgcaggtatttgcatacctgttcaaaaatataacggtcaagctcgacaataaacccgttcttctcaaacagcgggataaattcgcccggcatcaggacgccatacccgggccgttcccagcggacgagcgcctcggccccgaagatggagcagccgtgctggacgtctgccattggctggaaatagggcttgaattccccgtcctccagcgattttaccatgatggcctcaatctctttttcgcgcagaagctggcggcgcatttcatcgctgtagaacgccacgcggctgccgtcgagccgctttacgctcttttgcgcgaggttcgcgcggtctatcatatcctcgatactcaataaatcttcatttttctcgatgcagtacacgccggaaacaagctcaagccgcagttttttcccttggtctttcccatatttatacagatggcctgacatttcctgaaagcattcctcaagctcccgccggtccccgtaatagcgcaggcaaacgaaataatcgccggaaacacgcgcgaaaatctcgccctcccgcatcgtgctggagccgatattcgcccaaaaccgcagcacctggtcgccaaaatcgtagccatacatgtcgttgatgagcttgaagttgcgcaggtcgcagtaccacagggcatatttcttctctcccctgcttcgcagaagcgcggccgcgtcggtcttgaatttactgaaattgtagtgcccggtcagctcgtcatattcggcgcggtattcaagctccctgcggtcagcgattgccttatccacgtcagtcaccgtaatcatggagcggactatctttccatccttttcacggaggaccgtcagcgcaacattgcaccacaggtaacagccgtccgtctttttcaggcgtacagtcgtctgcgcgttgtcccttcccatatgaatgagctttgatacattttccgctttttcccaatcgtccggatgtacgtcctcccgcgtcaggaaatagtggtttccatcagcgccggtattgtgcaggaaagtaaactgccttgcctgtgcggatgcataatatgtattggtttcttttgtatattccagtaccatcatacccgcctgctccatgatagtacggtagcattcgctttccatctggcgtccaagcaaaatacggcgctgtgactgtgcttccgcagcattctttctggcggtaacgtctttgacaaagcaaaggtatatttccttgtgctgcgctatctggattggcacgagcgtaaattccgaccaggaaacggcatcgccgtcccgtacagttctgaattccgaagagatggacgccgccccgtctgcaaaagacttgcgcacggcgggccagtgaaagaaatcaagaaaacgcgccgcgtcttcctggtaaataatatcgcgtgcgtttttctctaaaattttgcttaggctgccctcttccagatgaaaaacgccgccttccttgtaggacgggacatagaaataatcgcctgtcacgtccataacggcaaggtcctcaaaaacgcgctggatactcttgatataccttctggtaagtgaaacgcgcgcctgcttgttttttttatcggattcccgtcttttcagcgtccattccggttcaaaatcacgcggcgcttccctgttttctatatagcgcgtgtcattgtacgtgctccagccttcctccagcatatcattctggtaaaaaacgcagcagccgcggccgagccttttggcttcataaagagcaatatccgccttctggtacaattcgtcgaaggccatgccgtccttcggaaatacggcaaccccaaggctcgcggaaataaacgtctgctcgtcaagccgcctggacaaggctgtacagagctgcgccgtcgtttcttcgagcgtctggttgagctgcacgttgcgcaggcaaatgacgaattcatccccgccgatacgtccgatgatatcttccgcgcgcagcgaggctttcagcgactttgcaaaatccataagcacacggtccccgaactgatgtccttttgtatcgttcagggtcttgaaatgatcgatatctaccatgacaaacgcatggcgaccgagcggagtgctcgtttcaagcagctgcgaaatctgctctattaccgtcctgcggtttaagagcccggtcagggcatccttttgcgacagctcctgcagctcaagctcccgccgctttttcccgtcgatattcttcagaacgaaaaacgccttgatatcgcccgtatagggctctgtaagaagctgtacatccgcctttgcccagaagggtttcttgtccttcccaagccgcctgtattcaagctccagatggcgtttgcctccttcaaaacacctgcacaggccatcacgtgaaaaaaagtcccggtaggcgactaaatcctctgggtaaatcaagtttttcaggatatattggaaggtttcgtcgtaacagccgcgcacttctgcagggatgttctgcacaagggggcctcccatatggtctatcctgtttttcgtaatattgcattcgtaaaaaatatgcgcgccttcaagctgcgccttgttatactgcgtccatttctcaaatgcaatttgttgttcccgctgctccgtgatatcttcaaccgagacgaccgtatatttcggttcgccggtttttccggtaacgagggagaaaacgcagcagcaccacaccgggtttccgctgcgcgggtctatcgtcctgataacggtctccccgcttttgtccccgcggagcatcgcatcgtaaaagttcttataatcttccttgctttccggggtaacaaggttgttttccagaaaacagcccggaacgttttcaatcgtttcgggaaggttcagctgctccgccgtttcctgcgcaatactaatgctgtgccctttaatatcaaagcggaatacgcagcggcctgactgcttgagcaggattttgcgctcctcatcgtgctttttaagctgctccattttataccggcgctccgatacattgagcaccatacagataaagcaggatgggtcatccctgtctggaattcccctggcaagcgtccacagtatcgcaccgctgcggtggatgccgcgcacctccagctcaaagaccccgccggcgtttttctccgctgccgcaaccgtttcgattgtccgctgccaatcgggcggatagataatatagctgatggttgaaaagcccgccttatccgcctcttcgcgggtatagccgtaaatcctgtaatattcatcgttagcgtcgagcagcgtgaagtacgcgtcgttttttattcggcagatgccgcagggaagaacatcgggcgtcaatattctttttttgttttccacgttccagttcacgcctttcgattaagccatctaagcttttgcatgcattttgcccagaggcatttccttttatatccagtgcaaacgattattattataatatatttacattaaaaatgcaattgtcctttcgtctattggacggcagtttttagaaaaaagaattaatttttgttgtcctcaccaaagaagcaccgggaaatcccggtgcctctttttaatcctccaatgaatcagacttatcgataacggtattgctgcggggcttccactgcattaccggacccatttcttcccggtacgcgcaaaaccggttttttccattgagcttcgctttatataaagcaatatccgctttctggtatagcgtttcaaacgtcgtcccgtcagccggaaaagcggcggttccaacgctgcaggaaatcgctgcgattatgccgttataattgaattccccgttgaacgccttacaaatacgctccgctttttttctgatggtttccctgccggggatttttttgagaaatactgcaaattcatcgccgccgattcgcccgataatatcctccggataaaacagggacgcaatccttcgggcgctttccgccagtatcttgtcgccgtacaggtgcccgtaccggtcgttcacgcccttgaaatcatcgatatcaataatgaaaagcgcgtcgtattctccctgtgcagccccggtacccattaagccgcggatgtgttcctccgttgcgcctttattataaagccccgtgagcgtatcgcgttctatctggttacgcagcagctcctcgcgccgcttttgctcgtcgatatcttctaaaatgccgattgcgcgcacggcgcttccctgcgcgtcgtaaatattggtcagggtgatttttctccaaacataccggcccgccgcaaggcgcgtctgaactatgcaggatgcgtgcggcgcgccgccgcgtattttccggtacatttccaaaaacacagatacgctgccgggatggattgtaccgttttccacgagggagtcgggtacgttttccatttctttcggaagcccataaacctccgcggatttatacgcgtgaatcatcatgcgtgtagcaatattataatcaaaaatcgtgttgtccatctgcgccagcgcaatacggaaccgctcctcgtttattttcagctcctgctccatctgcctgcgctgcgtgatatcgacgcagacacagtgaagcgccgtgtttaccgggccccggaaaaaattccccttaatcagcgcccagaccacattgccgtcccggcgggcaatccggtgctcaacctcaaagccgcctgctcctgcgtcaaacgctttcttgaccgctttttttacttccggcaaatcctccggaaggataatccttccgatttggttctggtgctctattttcaactgctcaggcgtatagccgtaaagctggaaaaaaaggccgttaccgtaaagcagcgtaaaaaaatcgtcatatgcagcctcgcagatgcctgccggcaaattagaaataatcgaggacaaaagcaggttgtccttagaaagcgcaccggcaagccctaaaagctcttcgcgcgtcattgcctgcaatttttttgtcacggctatattttcaggaatttccgcatcctttgaaattctacgcagtaaattttcatctcccatatacagcgccttccattctccatttaacccaaatttccaggacgttcccaaacaaacgccccgctttttaactggcctgtcccccgccgcgccgtatggcctaccctttccattcggctggcagcgcatctgttcaggttttacatttcaagctccgcctttattttatcatattggactgcgacatagacacaaagtcgcggtccgctaccacaaaatggtcaatcagtgtgacgcctacaagcgcgagcgccttattgatgtcgttggttgcgtaaatatcctgctcggagggcagggctaccccgctgggatggttatgcgcgagcgcggcgtattttgcgttatttgtaaccgcgagctgtacgattttcctgatataaagctggcattcggacatcgaacccttgctgattacgccgcagaaaagctccttgtattttgcgtcgagcagcatcaaaatgacgacctcgcattccctgccggtgaatttttcaagcatatgccgccctaaatttttttcattgattatcttatgcgtgttgttgtacttatcgtcggaataaagcctcgacatgccgggtatcatcttaagcaaaacggctgcattttcagtaagccccgcctgggtcaagacgttcaggggcgcgtcgagcaccgccgaaagggagccgaactgctcaagcagccggtgcgcaatcgggttggtatccttacgcggaacggcataataaagcagaagctcaagcgcttcgtgctgttcgaacccatcgaaatcatcaagcaggaatcttttgcgcatacggtccctgtgccccttatgcaacgtatcggattgcataaagctttcgcccccttttagcctgtgtttcaaaacaggacgccgtgctgtacatgcagggcgcccgttcggttttttatatgcttacgcttttcttgagccgggcttgacaaccggcagcttgccttccttacataaagggcagtcttccggttcccatgattcgacctctaccttaatgacggatttaaaaggaacgccgaaatcgaccgcgccgtttgtcctgttaacgatagaaccgacgccgacaacctccgcacccgcggcctttacgagctcgagcacttctttgactgagccgcctgtcgtcacaacatcctccaccagcagcaccttcataccgggtgtaacggcgaagcccctgcgcagggccatttttccgttctcgtcacgctcagcaaaaaagttttcacagcggaggtggcggctgacctcgtatgccatctgtacagcgcccatggccgggccgatgacaacgtccaccccctggtcttcaaactgttcggcaagcgccgcgcacagctcttcgctgtactttgtgttcctgaaaatcttggcacactgcaggtacctgttgctgtgccttccgctcgtcaaacggaaatgcccctccagaagcacgcccgcttcctttaatatctccataactctttcctgtgcaatcatgttccagttcctttcaaaatataaaatattattataatctttgtcattataaaccacaaattacaaattaaacagttgataaaagaattttcataaaattttctgcctgtgctttttccccttccgtttattctgggccaaaggggcttttttcttgaaaatgcatgcttaattacattgacacccctactgacaacaggtaaaatgtatatatataacttcaccgaatacgttttcggataaagaggataacatgaaaaaaaacgaattattccgtgactccagccaaataagccttataaatatcgcggcggtttccatcctcgcactgattttcgccgcggcttccattgtaaacgtatggattctgaacaacaatgtcaacttgatttataaagccccttattccgtcacaaaatatataaacgatattacaaacatcctttccagcatggaaatgcgtatcgtgcttcttccagcctacgcttccgccggcgaaagcgaggtcatcaggcaggatatcgaagcgctgactccccgccttatggacggcatccagtatataaaggaaaacagcatccgtccgaaaagtaaaatcggcgaacttgaacggacggttaactccattctggaaaagcaggaattgatttttgataagatagatacctatacgccccagggcctggaaagcgatattaacagcaacctggtcccctattacagaacatccgccgagctatgcgacctgatggctgaccttgcacaggaaaccgcggatgaaatcagccagaaatcgacctggacggcagcgacaaacacggcgatggcggctgtccttgcagcggttctggttattgtgacggtgtaccttcagaccgtcgtgcgcaaaaagaacggcgagctgctctaccgggaacacctgctctctatgataacggaaaacgtcgatgatgttacgttgatatataaccccgcaaaaaaagaaatcaactttgtaagcgccaatgcccagcgtgtgctggaacattcccctgaggagctgaaagaacgctgctttgaaatttttcccgaactgtggaaaaggctgtctttcctgaacggtattaagaatccggatgaaacggaatttcgttttatccgtaaaaacgatacgattccccgttggctgcagccgcgcttttacccaatccaggcggataaaaaagaaaacaacgtgattattacgctgaccgacctgaccgaagaaaaaaaggcgcggtatgccctggagaacgcgctgctgaccgcgcagaaggcgaccgatgcgcgcagggcgttcctctccaggatgagccatgaaatcaggacgccgctcaacgcaatcataggaatggcggcgattgctcagtcagccgagggcaacccggtaaaaacacaggactgcctgatgaaaatcaggttttcctcaaagcacctgctcaacattatcaatgaagtcctcgacatgtcggcaattgaaaacgggaaaatgcaggtatcaaacgagccgttccagctcaaagggctgctcgcgtccgtcacgtcagtctattatgaccaatgcaaacaggccgggaaaaactttaaatgctatgcgtacaatatacataacagcgcgcttatcggggaccagttccgtctgaaccagattctcctgaacctcctgtctaatgcctttaagtttacggagcctgggggaaccgtcacactctctgttgaagagcttgcattgcgggacaggcgtgttttcctgcgcttttgtgtaacggacgacggtattggaatggacgaggcggctgtgaaaagggtttttgagccgtttgagcaggcatcccccaccaccgcgcagaaatacggcggctcagggcttggcctttcgattaccaaaaacctggcggagctgatgggcggcagtataaacgtaacgagtaaaaagggcgaagggacgcaattccgtgtggagctttcgtttgaatgcgaaccgcaggaatgcatatccgacgcatcttcattttccagcctcaacgtcctgcttattgacacggatgaccaaagccgtccgcaggtgagcagcgcgctccacagcctcaatgtccagaccaaagaggcccgctctttcaagcaggcgaatgcccttttatacggtgcgggcaaaaagggcattcgctttgattactgtattctcgtatgcgaaaccgtcgataatgaggttttggattttgcggcgcgcctgattaaatcccccgctggagcacgggctggaattgcgttgtttgcctattccttcgtgcagggcaaggaggatttaaaaaaatggggtatcgattatttaagccttcggccggttctccgctgtgaactcgcacgcttttttataaataaaggccttgcgcaggacatgcaaaaggacgagcagcgggaaaaggaatacgatttcagcggaaggcgcctgctgctggcagaggataacgagctcaatttggaaatcgcgcgcgagctgcttaaacgtaccggcgcagaggtggacgccgcgcacgacggccaggaggcctgcgatatgttcctgaacacgccgcagggttcctacgacgcggtccttctcgatatacagatgcccttgatggacgggtaccaggccgcgaagaaaatacgcgcctcctcccatccagacgccaaagcggtcccgattatcgctatgacggcaaacgctttttcggaggatgtggtagccgcgttatccgctggaatggacgggcatgtcgccaagcccgtcgagccagagcttttgtaccaaacgctcggagcatttttgaaaggagctccgaagcataacatataaaggatgatatatatgaatgaacaactcaaaaggtcgctttccatctggggagccgacattgacggtgctgtaaggcgttttgcggggaacgaagcgctttataaaaagttcctgtacaaatttttacaggacaaaacctacgaaagcctttcagaggccgtaaaaaacggcgatacggaagaggcgatgcgcgcttctcacacgttaaaggggattaccggaaacctggggctgaatccgctgttttccctatgctccgattacgtgaacgcaatccgctcaggcgagctttcaaagctgccggatttgtatgaaaaaattcaaataagctaccaagctgtgacccagatattaaaggaaaacgaaggttgaccgaaaatgaaaagggaagatacaattctagtcgttgacgacatggaagtaaaccgggcggtcctgtgcagtatttttgaaaacaaatgcaatgtccttgaggcggaaaacggcaggcaggccatggagattctggaaaagaacccagcggtcaacgtcattctgctcgatatcgtcatgccggaaatggacggctaccaggtactgcagaaaatgaacgaaagcggtactatcgataaaatacctgttgttgtcatcactgcagagatttctcccgaaattgagctgctcgccttcgatttaggcgcgcgcgatattatttccaaaccgtttgaaccgtttattgtaaaacgccgggtagaaaatatcatcgagctgtaccggcacaggctccatctggaagagcttgtcagggaccaggcctataagctcaaggagtcaaacgaaatcatcatagacgctttaagctccgttattgaatcccgcagcctggaatcaggacagcatattttcaggattaggatgtttacaaaaatcctgctgaaggagattgcgaagacaaacagcggctacgacttgaacgaacatacaatcgagctaatcgcgagcgcctcctctatgcacgatattgggaaaatcgcaatacccgattcgattttaaacaaaccgggccggctaaccgccgacgagtttgaaattatgaaaacacataccacgaccggatgtaaaatccttaaaagcctcaataaaatgtccgacagggaatacctgctttatgcttacaatatttgccgctaccaccacgagcgatatgacggcaagggctatcccgacggacttaagggggataatatcccaatctgcgcgcaggccgtatctgtggccgacgcctacgacgcgctgacgaccgaccgggtttataaaagcgcctatccgcatcaaaaggcgatggatatgattcttggcggagagtgcggcacgtttaaccctcaaattctccagtgcttgaagaaggtttctgaacaattccggcagcttgccaaaaactacgctgacggcagctttatctatccgcatacggaggaaggcgattccggcgcgcaaattgcgtctttttcattttcaaaggaggagctttcccatattgagctttattctgtgctgcgctatcttgggcataccgcaattgaattcgatttaaacacggaatattttaatatcctttatgcgcccgaggattccctcgctatatttaaagataagggtggccacacccaacgcagcgaatttatgaatgattttatcagccattacgtccatccggaggatatcgattcggttatgggttttatctccgcgcggtatgaggatttttttgaagaagtgcagtcccagccatatcatgaatttcgcgcgcttgacccccagacccagcggtgcgcttcatacagggcgacgtttttacctctgcgtacagatatcccccaaaaccgcaaagccatcgtcatattggaaaacagcgcgccgcctgctcccctttcttccaatatgagcacccatgcaagcgattcgaacgaggcgcatgtaatggaaacgctgcatgaaagctataccatgacggcggtgatagacctgacgaaggattcgttcatggtcctgcatacaaacgagcaggacccctacacccattacgccgccgtatcctacagcggaatctgcgaagagcttttacaaaacagggtacatcccgatgacagaagctattttgaagagaatttttccttggaaaatatgcgccgtttttttacggcggaaacgaaaaaatccgttgtataccgtttccttggacgaaacgggaagtatcactggcgtgaaaacatgcttgtaaaaaacaacagcttcagcggaggcgatacgctcgtatacagccttgtgaagtatgctgaccaaaatgaaatcgaccgtatcaaggcggcgcggcgcgacgtaattttcggacgggaaatctaccccgtcctgctggataagttctgcgatattatatttgagtacgacctgaaaaacggaaccacctattattcgcacggctttgaagaaaagtttggcttccgtgcgccgaataacatgcgggagctatataacgcggcgagaacacatatcagcaaggaggatatcgacgaatacatcgcgtgtctgaaaaacctcgacgaaccgcccgatatacgtgatatcgagtaccgttaccgcaacgcaaagggcgattatatttggtgccgcaaacggtttttgattacgcgcgacgaatccggctttgcaatcagggtaaacggcataatgacggacgtggaccgctataagcgtgaaaacgcgctgctcaggcaaaagtcagaaacagaccagctgaccggattatataataaaatgacggtgcaggacaggattcaggcatacctttcggagtgccccgccgatacgatgcacgcgctgtttattctcgatatcgataatttcaaaatcgtcaacgacatttacggccacctcaccggggataagacgcttgaaaaaatatcggaccgcattacctcggtgtttgaggacaacagcattgtcgggcgcgtcggaggcgacgaatttattatctttatcaaggaggtcccaagcagcggctacgcgcatgataaagcacagctgctgctaaaccgcctcaacgaaatcctctcctcgtttaacaacacggcaagcatttccgtcagcattggcatttcattttatccgcaggacggtacagccttttatgatttgttcacgcgggctgaccttgcgctttatgaggcaaagcgccttgggaaaagccagtggcgcgtttataatgaaagtatgaacacaaacgcgtccctgctgaaaagctcgccggaacacctgcgcgcagaacacagctttacagacagcttcaaaatccagcttttacaaaatttctacgcatgcgaaacgcctgaggaaggaatccggtttatttttgacgcgacagcgcgttactgcggcctttcccatatcctgatatacgaaacatacagcggagcgaaaaagctgtacgactggagcgcaagctccattttaaatcatacgtcttaccccggagggcctctttctgaagatatccgccgtgagctgcttggccttgcctcggaaaatgggcttttatgtattgaggacgccgacgggctttcctcagctggactgcgcaaatatctcaaggaagcccagagcgcagctttactgattgcgggagtagcggacagcaagaccgaatacggctttgtcgcctttgtcgagcatgaggctgcgcgccaatggtcaaagcacgaaaaggatatcatctcttttgtcgctaaaaccgccgcgctcgtttaccttaagacgaggtacctgcaggaccttgaagaaaaatatacgctgagcaacctgtatttcaatcaaataaacatcgctggatatgtgattgacgaaacctttaagataatggaggcaaaccgtttcctgcgtgaaaaaatgatgatagaaaccggagaaaaatgctaccggctatttcaaaacagggataagccctgtgaaggctgccccgtgctcaagctcaataagtcctgcaataccgcaacatcgcctatttaccgaaaaaaatacgacgaagaggttacggtaacggcagcgaaatgcaaaacagggcggcgtgcggtttcttatctggtaacggttggaaaaaaagataaaatttctttttaaaacgtgttgacaaaccggcctttgccgcatataataaatacaaagaaggaaatattggcaaacctggcgaaagccagcgacgcaaagcgatgagtctaaggcgtacggcgctatgattgtcaggctgcattattacaaaataataatgcagcttttttattgtaaagcagtaccgccgcatggaacgcataatcacaaagaatatttggcaaacctggcgaaagccagcgacgcaaagcgatgagtctaaggcgcacggcgctacgattgtcaggctgcattattacaatgataatgcggcttttttatttcctgaaggacacaaaacaaaataaccggcaaacctggcgaaagccagcgacgcaaagcgatgagtctaaggcgcacggcgctatgattgtcaggctgcattattacaatgataatgcggcttttctttttcctgagaagtatatttttgaaagcgggtagtcaatatgaaaaaatttaaaggttttaaaacggttactgcggttctcctggctgttatcatttcggcgggatgcgcgctcgtgtcagcatcggcggcttccagcgaatatgcgcttatcgcctcctccgacacaaaaatcagcggctccgctcaggttcgcggcaacgcgctgattacaggcggaaagctggaaggcggatacaacccatggagtacggggaccatatttaccgctcccggcgtatctgtaaaaaacccttccgacccgaataagggtattgtcaaagattatacgggcactgtaccctcctatcggtttgaaagctacagtaaagcgcctgaaacaacatattttctcgaaaagggcacgcagtttaaggacgggacgaaagatttgaccgtcggcagcggcgaattcaaaaatggttttgtcctcaagaccgacgcttttatccgcaacctgaccgtcccttatgatacgacgctcaccatcgacgcgctcggcggcgtcgccatcatccgggtcggcaagcttacgaacaacggcattatcaatataaagagcgggaaagctgttatttatgtcgatgaaatcggctctgtcaacaatggctccttcaacaccggcagtgcgtcggacaatggcggaaagccggaatacctgaccatgttcatcaacgactacagtaaaaatatcaatatgaactacgcaaaatttgccggcaatattatcgttccctattcaaatttccatatgaacagcacggcgatgaccggcaatgtctacgccggcaaggacgtcatgttcgacggcgacaataaaattaccggcctcgtttacgcgccggaatcccaaaccaagcttgcaggcagctcttacatcaaagggcagcttattaccaatacgctcgacctgagcggctcgggctatattggacttggcggctttcaggagcttccctcagatattattgacggcgtaggcgacaaaaacaacagccagataacaggcggcggggctccccagcccgaggaacccacacagcccgcaccggaaacgcccgcacagcccggcggctccgataacagcggctctgaacagccgaccgagccttcggcaggcggcaatacggacacacagcccagcgacggcgaggttacaatcaccgcggtggttgcgcgcaggatgtccatcaggcttgaggacggacgcatcctcaagagcggagacaaattcaatatgccgaaatacggcaccatccgtttccaggtctgcacaaacaattgggatacaaatacgtatacggacgacggtcaggggctcgcgggtcccgtcgtatatgaattcacacataagaaaaacaaggagctttacctgagggtcgataacgaccgttactttatgccggtacgctttcattttgaaaagggtgactacagtaagctgacgggcgtagaccaggtgctttccaccccgcttgagagcctgtcgattaacttcccgctgggtgcgactgtaaacgtcaaggcttttgtaaaaagccaggtcgtcgattcccagaacatttttgtcgattccaacctggaatggtacaattggccgtactaatccgaacaaattataagtaaccatccccccttattatccattacaaatgaaaccggctgattaaagaagcctcaactgctgagtccctctttagtcagccgtaatttttggtaattctcagaaatatgcaggaaaggccaggcagtcaaatatgaaaaaatccgtcaataaaaagcttccagtgatactcgcgctcagcgcggcggccgtcgttattgccgccgtctgtattgtcggcgtgctcttgtcgcagaaagactacgataccgtcaaggacaacgaaaacagcagtaaggctgtgtcttcccagaaggcaccgcaaagctccgcttcctcagacagcgcatatgccgccatcaaagtaacaaacggcttcaacgacgaaagcttcgaccccgtattctatacgaaacggctttacgagctgaaataccagtttggaatagatgccttcgattccgtttccgacctgtcagtgagcgcggtcgtccagcttgcgttctgccatatttattatgacagcctgaccgaaatgcccgacgaaaagaacatgctattccgccaggtgctccctgaatcgatttccgagaaaatcacagagctttttggcaaaaataatgttgacgtttccaaaagcgacctttacaataaagatagcggccttgtagaaatgtggcagccgaagctcggcgctatggtttacgcaaacgtctcctgtgataaaacaggcgacgggcagtacactctgacagccacgttctttaaggaagaggacaagacgcagaaggacagcaccgtcaccggcgtttttgaaaagcagggtgacggatatattataaagagcatgaaaacgcagtaacccgttttctgtatgctctctctttgacggaaggtgaccccgcgtatgcatacggctgtaagccccaacgaaacgaaaacagaacaaaatgccgcgccgcaggcggaggccgcggaacaagccgcgccctcttccctgccggacgtgacggacggagaagttaccggcggagcttccggtacgcaggcccttttacagcctgacgagcagcttcaggcacttctggcggaaaacgaagcgctgcacaaagaaaaccaggagctattactgcgctgtgacgcctttgaaaaagaaaccataggaaagacggacgatatcaggcgccagcttacagagctgaaaaccgcgcttaccgacagggtttacctgcttgtatgcgcttatgaagaaacgatagaaaaaatagacaggctcattgaatcgctccccgcggaaatcgcgcgggatggcgcggcggccgcgcaggcccaaacacgcgccgtggataccggcgccgtcccgcaccagacgaggcttccctctggggatagcctttcttccaaagcggcggatacgcttacggaagaaaagaaggtatccattatcgaaacgctcaagaacaattctacgcctgcggagccggtaaaacctgccttcggcgtaacgcataaggagcgcgcgaacgccaaaaacctcctgaaaaaatattctaagattcaataagaatagcatgacgccggggccgatcccccggcgattttacataagatggagccaatagaatgaaagtcaagtttaccaatttgaaaatcatccaaagtatcgggctttccctgctcgtatttattttactgcttgccgcggtccttccgctgtgtgtggtcgagccgcagttaaagcccatggcggaggatgatatttccattacggactggcgttttgtctggggcggcgacagctcctccattgaaggtaagatagaggaatggaatatcgccaacgtaaacaagcctgttacaaagcagtttggttctcagtttgtccgcatgcgcacaacactgcccgtacacgcacaggaaaaggcgctgcaaattgtaaccgctggaaatccggtcaaggtactgcttgacggcaaggagatatataacaacggttatggcgcgcaggtatatacgggaaaccggacgaatgtcgtcacggtaagcgcgtctgacaaggaacagcagctagagctttacctgcaggtacccctttccttcgaccttgacgtaaggctgatttcgccagcgagcgcagtcaatgtgctttccctgttaagcgttatcggcatctccctgggtatcggcgttatactgaccgcgattctaatcattattttaatgggcctgttctccgtcaagggctaccaattgaacgctgccgtatgggtcggcgggatgctgctgctcacagggcttgggcttattctttctcaggccggtttttttgcttccggcttttcaagcccctggctctataaaatcgaggcgctctccatccttgcttcaagcgcgggaatgtcgtttatcagtatccatatagtaagcggctggcgcaggaacgagcaaatcgtcgtctgggcgcagatgatttacgccgtgctttatatgattctgccagacataatcggcgtatggcttttaatgctcgcgccgtttgtcctgcttgccggcgtcgtactcgttacgctgcgtatgaccgattttgtacaggggaaccagcgttacagcgcgctgattacctttgcatacctaagcggctccttctgtatcctgtttgatttcctcaaccagctcattggctggatgccgcccatacacgagctttccttcgcaggaatattcgttttctgctatatcgcgttctttatcctcgtcaagcagtcaatccgcgtacatatccgcctgcgtgagcgtgaaaagcagattgagctcgattcaaaatgggtacagcgcaccatatcgagctgcgccgtcgtctttacccagcaggacgatatcggcttctgccgcgaaacggcaaacgccgtgaaggacctcgtcctgtttgaccgcctgtgccgtgaggaaaacgccagcctgggagaaggaaacattagtatctgtattgctctgatggaaagcggcgctttccatgaaatatacacggaaaaccaggcggaagcatgccgctatgaaaaaatacttgagcattcgcgcgacagggacggggaatccctcctgttcggcgcgcgctgtgtcgatatgctcctgcgctaccagagcgaggtcttctgtattatccatgtagagggcgtgaccggaggtatttcgtccaatttacagaacatcatgcacatcgcgtacacaaactttgaatccgcgcttaacagcatgaagctgcacaagggcatgaacgacacgcaaatcaacgtattcctgaaccttgcagagcttgcggagtaccgttcgcataatacaggcgagcacctgaaggttgtgtccgaatttgtaaacgtgctgtgcgaagagctcggcatcgaggaaaaggagcgcgagattatttcgattgcttccatgatgcacgacatcggcaagctggctattcccgaggcaatcatcgacaaggaaggcaagctcacggaagaggagttcgagcaaatcaaaaagcacatttattatggttataatatcctgtcaaagtcatcgggcgaattcatggaagccgcggcgattatcgcgaaggagcaccatgagcggttcgacggtacgggctatatgggaatcaagggtaagaacatccacctgtacgcgcgtatcgttatggtagccgacgtattcgacgcgcttttgagcgaacgctcctataaaaaggcatggccagaggaggaagcggccgcgcatatcaacgagcagtccggcaggcatttcgaccccgaaattataaaagcattcaaccgctgtaaggacaggatgctcgacatcaagcataaatatgacgggccggcgccgctgcccgaagatacgaaaggctgactgaaacgatgaaagaaaaagcgaaacggtttttaaagccgtattttatcataccggcagcaatattgctgctcgccattatcattttcggcggctggttcttaatcccctcttccccgcttgatattgttgtgctggacaaaacggtgcccgcgggcgcttccggtacggcagacgaccccatcttgagtttccgaaagcactacggcctgttttggctgctcgacacgctcaaatataaaaacccacagactggcaacgcctacgattatgaaacggactattacggctccgtgctcagcggcgacttacagcctgaggaaaaaagcatggcgaacctggggcgcacgcccgacatggtttaccttgcggacgcgtacggcgcggatacaaaaaacacaaaggacggcaacaaggggatttcctatgatgatatttccgccgccgcggtcgcgcatgaaaacggcgcgacgctgattgcggagaccgatatcctcgcaagcgcaacggaggattctgtcaagggcgagctgcaaagcacttttggctttaagtatacgggatggaccggacgctatatcacagatatggcagacctgtcggatgttcccacctgggcgcagtcgctccacgaaagccagttcgggcggccctgggactataagggcgcgggaatgctgctcgtttcggaaaaggaagaaatcatcgtgctcgaggaaaaggattttgacggagacatgctttctatcagcatcaatcccgattacgagaaggaattcggcaagcacgccgtcaattattataactggtttgaaatcgtcacaccggagtacggcaccgaaaccatcgcaagctaccgcatgaatttgaacgacagcggcaaagaaaaattcggtaaaatctccaacgagacggattttcccgcggttgtgcgcaccaaaaacgcgaaggcccccgcctattatttcgcgggcgatttcaacgattatgtttcgtttgagcgttattcgcatttcctgttttcgctgaacctttaccagatgttcagctatgagcgcgcgggcgacatcacaaatttttactggaacttctacacgcccttaatggatacgattttaaagcagacaaaagagaataaagaaaatgtcgtccagccagctccaaacagccaggcgagcttccgaatcgagggcaacgggttccagctgaaaaacggcgatgaatggcaggcgttccctgtcaagggctttaacgtaaacggcgtaatgcccggagacggcatcggggatgacacccgggatatttccgtttatcaggattattttaaacaaatcgccgaaatgggcggcaataccgtacgcgcttatgacctgatgccgccggaattctaccgcgcgctgtgtgagcacaacctggaaaatccggagcagcccgtttactttttacagaccatccctcttcccaacacggtaacgggcgaccaggcggtttatgacgagccaaaaaaggaaatcaaaaaatatattgagtatgtcattaacagtatacatggcaaaaacagtgaagctgccgaacagaaggaaaaacgaacctactcaatcgacgcggccgcttacctgattggctttatcgcgcagattgacgactccttggaaaccataaaagcaatcaatgaggaaaacaggagcccggcagattaccagggcgattacatttccgtctacggaggcagcgcggcacaggcgctgatggcggagctgtgcgattatatctacttataccagcaaaaaacgtttgaatacattacgcctgtgggcgccgcgggtaacccccgcctaatcggcggctccggctgggtgcttgactatgaaagcgtaagcttcgatttgaacagcctggacgcgtccgataaaacgggcggttcgttcttcgtttcttacccgcttacgccttacgacgacctgttattgaaccatacgaaagatttgtttggcgattacaccgacgcgtcgggtacctttgcctatggcggctatgtccgtgaggtaaagaagctccatacggactatcccgtgctggcggacaatattgtgctgtccaccaacaccaacgcctttgaaaaggaaacctccatcaacggcctgacggaaacccagcagggcaacggacttgtccgtatgctgcaggcggtggacaccgaaggataccttggcggcctgattggggacttcgccgattgctggagcaagctgtccgatgagcagtcgaagtttatcctgccggaaaaggacaatcccctctggcatgacatgctcgactatatgcagaacaccggcgtcgtttcgattgaaccgaagaattcgggagaaattggcatgagcgtcaaggacactggccgtatgcaggagatgcaggtctctatagacccttcttacctatatgtaacggcagtctttgacagcgaaatcaattacgaccaggagcagctgataatcgggctggatacctaccagagaaacaacggcgaatatctttatgattccgactactttgcgacgagcctctccggtatggaatataccgtcaagtttgaaagcaagaacacggcggcgctctatgtaataccgagctacaaccgcagcaacgggaaatacagctcaaaggaaacgtataaagggaaatacgattacgtatgccagcttgtttacgggccgttcgacgacagcgcgaaccacttctaccagacgggctccaccatccatctgcgcattcccttgagcctgctcaacatcaccgacccgtccaaaatgctcgtgttaaacgacaccagaagccagaaggaaatcgataaggacgcattcggcttgcagacgatgagcaccgacggcatcatcttctccgtactgattgccgacaagggcagcaaagacacggcgtatatcttcccggaaagcaaaaaatccggcgggtacaagactttcaaatggtccgcgtggacgcagcctgaatatgtattccgccaaaaggcaagcttcaaaatcctgcagcgttactttacatctaactattagaaagcagatgaattccgccatgagctatgaacagattgctattttaggtatcattatatgcgtgcttgtcattgtggcggagctgctttggctgttttccctagcagagggacaggagtcccatgccaagaagcatttcgccgccgtcgaatacatagacaattccctcggcatgattttaaattacccaacgcagtccactttgaaaacagagactgaggcgctcaaggaatttgtaggggacgaccagatgaggatggacattatgtctgaccggattttggatgttttgttcctggagcagtatgacgacgagcagaaggccgcagcctgttacctgaacgaccagattgtcccgcttgatttctaccgtgatatgctgcatgacggaaaccagtatgaaaaagcgtttgcctgcaggaaaatagccaccttcggcggcgaggatgaaatcccggaaatccgcaagctgatggatgtgaggaacgcggacgtttcctacaacgcggccatggcgctttccgcctttggggacgaggaatccgtcgcgcagtttattataaactgtgaaaagaactaccggtattcccaccggattatcctggagctgctcgacgtatacggcggcgatatgctttcgcttgcaaggcgtatctttgagcagtgcgacgacgattacatcaagtcaacgattatcaaggggatttcggacttcagatttaccgagtttgaggatatgtatatcgaaggcacggacagcaaaaacaacaatatcaaaattgcgtgtatcaaggcgcttggaaagataggcaagaaggaatacgagcaggcgctcattacagcctcgcgcgaccaaaactgggtcgtgcgcgcaaccgccgtgaaggagcttggcgtcctgcacacgaaaaactgcctcagcgcgctggaagaggcgacacaggacaaggaatggtgggtgcgctttaacgccgccaaaacgcttgtcgaatgcgacaggacctgggagcacatcgaagcggtgctgaatggctacgataaatttgcatcagacgcggtaaaatacgcgctttacaaaaaatacgacatcaacccaaataaggaagcaaaggaaatcctggaggagcggcacgcttccatgggagataaaaacgaagccgcaggagggctttttggcgcttccaaagatgcggatacccaagcggctgccgcggcggaaccgtccgcgccctcccctgttttgcaggacgttccccaaaacggggagaaacaaagctcacaaaatggtgaagggggcggcacaaccgaatgaattttatgaacgccgtgcgcgtctttatttattacttcaatattttctgtatggtctttaccctgctgctgagcattatctacgtgctgcagctcgtgttttcataccggcagattacaaagcaccgcaagcgcaagccggcggacgattatatcaattacatcgattccgaaaacctgatgccgatttccattctcgttcccgcgcataacgaggaagcgcatatcgtggataatatccacgcgctgatggagctcgattacccggaatttgagctgattgtcgtaaacgacggctcgaccgactcgacgcatgacaaaataataagcgcgttcgggctttataaaatagagcactccatcaaggtgtctatcccgaccaaggaaatccgcggggtttattacaacgcgaaataccccaggcttatctatgtagacaaggaaaacggcggtaagtcggacgctttaaacgccggcatcaacgtttcagtctatcccctgttcgtctgcctggacgccgattcccgtattgagaaggacgccgtgctaaagcttgcgaccgagtttatgaaggattcctctacggtcgtcgcgggcgggctcgtccgtattgcaaacggagcggttattgaaaagggtgaatggaaaagctttaccatgccggaaaaagcggtcgaaaagttccagatagtcgaatatttccgcgcgttcctcgcgggccgcgtcagctggagcatgaacaattccctgctgattgtctcaggcgcgttcggcgtgttcaacaagcagacggtcatcgacgtaggcggctacaaaaacggtaccgtcggcgaggacatggaaattgtcgtgcgcatccacgaaaagctcaggcgcggcaagctgaaaagaaaatacaacatcgtattctgtgaggacgccgtctgctggacgcaggggccgatgtccctgaaggatttgcgcagccagagaaggcgctggcacatcgggctgacagacacgctgttccatcataaaaagatgattttaaaccccttttacggggcggtcggactgttctctatcccctacagctggattttcgaatggctcggcgcaccgattgaggtgctcggctacctgattatcccgctttccctctttttgggcgagctgagcctgcaattcttcctcctgtacctgttccttgcaatcgggcttggcatcgtcatttcactcggcggtttgattctggaacagaaaacccgccaggagcgcatgtcggccaagcaggtcatgacgctcacgctgtacgcgattctcgaaaacttcggctaccggcagctcgtcaccatcttccgtatggagggcattttgcgttaccctcagctgaaaaacacctgggggcaaatcaaacggcaggacttcaacaccagcagtaccggaaacgccggcaagaaatagcttcagattactgcaaggacataaccgataaggagttcatcatatgaagagcaaaaaaatcatcatcgcggcggtagccgttatagcggttgtgcttattttaatacaaaccgggctgctgcggggcgtcggtatccgcccgttcggcgaagaggaggaaggtacgtcttcccagccgtccggcagctccttcgattatgttacgcagggcagcctgaaataccgcgtcaaggcggagggcaactacttttatttttaccaaaacggggaatggaaaaaggagttccttaagggcgtgaatatcggcgcgggcgagcccggcctgttccccggcgagcttaccatcagctatgaggattactaccgctggttccagcagattagcgatatgaacgtcaactgcatccgcgtttacacaacgctgcgcccgcagttctataatgctctgtacgactttaacgaacaggcgaaaaaaccgctctatctgttccagggcgtctggatagacgaggcggacgtacaggctttatcagacgtgtacgcccaaaatggaaaaattgcggaggacttcacgcaggacgcgctcgaccttgtagacgtgctccacggaaataaaacgctgccggcgcgcgcgggctttgcctccggcgaatatacggcggatgtatcgaaataccttgccggctggattatcggtattgaatgggacccgaacctcgtagacaacacgaacaacaataatcccgacaaaaacgagtatgagggaaattacctctatacgatgagcgccacaccgtttgagtcgttcttgtgcagcgtcggcgacaaggtcattgagcggcagacgaaggaatacggcgtgcaggtgcctgtagcgtttgcgaactgggtgacgacggacccgatttcccacccaaacgagccgcatgaggacgaggaccgcacgacggtcaatatggaaaatataaaaagccgcgacgggttcctccccgggcagtttgcctcctatcacgtttacccctattacccggactcgttcaactatcaggaggactatatcaattatatagaccccgacgggaaggtaaacccctaccgcgcgtatttgaaggacttgaagcttgcgcacactatgccgattatcgtcgcggagttcggcattccgacgtcgcgcggcaaggcgcatgaaagcatcatgggctacaaccagggcggcgtgagcgaaaccgaccaggcggaaatgctgctggatatgttcaagtcgatgtatgaggaaaactacgccggcggcatcgtctttacctggcaggatgaatggttcaagcggacctggaacaacgtcaagttcgacgtgccggacaaacgcccgttctggagcaactaccagacgaacgagcaaaacttcgggatattggcgttcgacccgggcgaggaaaaaagcacctgctatgtagacggggatatcggcgactggaatgacaattcccctatccttacaaattcagcgggcagcctttacatgaagagcgacgagaaatacgtctattttatggtaaagtccgactcctacgactttgataacgacacgctgctgattccgctcgacaccatcgcgcagcagggaaacctccgtatcaaggatgaaaaggtaacgtttgacaaggcggctgattttgttatccgaatcaacggcaaggacaattcccgtattacggtagattcttactatgatgtattttattacctctacggtgaacaatataaaatgctggagctggtcgatgacatccgcaccaagaattccgggcgcttcaacaacatgatgatgtgctataattatgaaatgaccgtcccgccgaaaaacaccgttatccccttcggctcgtatgaaacgggcaagcttacctacggcaacgcaaacccggacgcggaggattacgattcgctcgcggacttctgctacagggacggcgcgctggaaatcaaaatcccgtggcagcttctaaacgtaatggatccgtcgggcaagcaggttatggacgatttctataccatgcagaacattgttgcgatggatacggacgactgggcggtcggcatggggatttatgattccaaatccgagcaggaaatcaagctcagcggcacatatacatgggaggaatggacgcttccgacgtatcatgagcgcttaaagccctcctactacattctgaaagaccagctcccgcaatttgaatagtgaaggagaaccgcctgtgaatgaacacatggataacaatgaaacgccggcgaaaaagcacctgtataaaagacgccatatgattatcgcgacggccgcgctgctcaccgcggcggccgtcttttccatcctttggatgacgctcggaggcaggcaggcttctcccgcggggaatcccacccagagcacgcagcccccgcttgtgattgatggcaaggacgcctaccccacgccgaaggcaaccatccaggcggttgacagcggaaaggtcaagctttataccagagcctccaatgattatttctatacgctgacaggcggcgtctggaaatgcacgtatttaaagggcgtcaacatgggccttacgctcccgacgaccgatttgaacgacccggatatcccatatgacacctatatggagtggttcgggcagattgcggcgatgaacgcgaacaccgtcaaggtttttaccgtaatgaaccccgatttctataacgcctttgccgattacaacgaaaagcacccggaaaatccgctgtatcttttacagggaatctggtttaacgaaacgtatatggaaaccgtaggagacgcctttggagaaaacggcaaaatcgtacaggcgtttgagcgcgcctgtacggaaacggccgatattatccacgggaacagcgattacacttcttatggcagcatagaaaacgccgtttacgaccgtgatatctcaaaatatgtagcgggctatatcctggggcttgaatggcagccggattttgtaacgaacacgaacaaaaataacgctgaacgcaaggcgtataccggaaattacctcaaaacggaaaacgcttctccctttgaggtcttcctcgcgcagacgggcgacacgctgatttcctacgaaacaaaaacctacagcgcacagacgccggtggccttcctcaactggtcgacgaccgacagccttacgcacagcaacgagccgttcccggaggaagacgccgtgccggtagatacggagcatatcaaggcaaaaccggaattctacgccgggctgtttgccgcaatcgatttgtacccctattacccggaatttataaattatcagcccgaatatgtcgattttattgattttacggagcaatccaatccctaccgcgcctacctgcgcgatttaaagaaacaatattccgtccctgtgattgccgcggaattcggcgtgccatcctcgcgcggcatcgcacatgaaagtgtgatgggctataaccagggcggtttgacggagcagcagcagggcgagtacaccgctaaaatggcgcaggacctcgcgcgtgagcagtttgcgggctccatggtgttcgaatggcaggacgaatggtttaagcagacgtggaataccgtaaaatatgcgcccgaggattctgaaaagcgcacgccgaacgcccagtctgcggaacagggctacggccttctttcctgcgagccgggcaagacaaaaagcgttagctgccctgacggcagcctgtccgaatgggacggagacgagcctgtttacaaggatgaaaaaaccagagtctatgtaaaaacggacgagggatatctttacttgatggtaaagctcgtcggcacggcttctcctgaggaatgccatctataccttcccatatccttaggcgggaacggcagtatatttgccggaagggaagcgcttattttcagcgaccccgctgattttttactggaactaaacggaaaaaaagagacgcgcctgctcactgacgcctataacgatttattttattaccagtacgcggtggaaaaaaacctgtttgagcgccagaaagaaaacgaaaagaaaaattccggcgtatataatcaaatccgtcagtttttgagcaacgaaatcgtcctgccgctttccggcaaaacgtacgagcccaaggcatatgagtcggggctgctgcgttatgggaacggcaacccggatagcagcggctacgattccctggcagatttctgctatggtgataatgcgattgaaatacgcttgccctggtacctgttaggcgtggtaaacgcggcggaaaagaaagtaataggcgactttttccaaagcgggcaaatcacgtttcaggacggcgggaatatcatgctgggcgctgtgttcgcgggcgacaactcacaggtagagatgaaggcttacaaatgggacgcgatagaaaaatccacgtggcacacaaggctgaaggactcatatcaaattatccagagctgtttttccagcctgatgaaggattatagctaacaccatatttattaccggaacaaacgaaagggagacggtcaaaagccgtctccctttcgttttcaaacccaatattctacattttcatggcgcagtcaatcgtcttgctttttctcgaattcctgatacggccgccgtatgtaccctaaaagcaaggccgccgttttgaatggaagcccataaaccagcaggcgcgtttattgcacaagctggcaaattttcatttgtattatcaaaatcagaatgcgggcgctatataaaaaagctgtacgcagaacaaaacgtccgcttataaaagcgggcgttttgcgtatgctgtaatgtctgtttattacaaatgttccctgatatacgcaagccccttcacggcgatatcctctttgcacggcgccatttcacgccagatgtgcaggcgagaggcaagcgcgggtacagaggtgtcgaacgcctctatcgtcagccatccgtcatattcgatgtcgcggagcgcattgaaaacgtcacacgtaacggcgcagcccgtcccgggaataccgcgcgtattctctgaaatatgcacatgcctgatatattttcccgcgtcccttatagactgcggcatatcgagctcttccatattcccgtggcaggtgtcggcgtggatgccgaagtaaggggaatcgatacgctttgctatctgcagggcctgagcgattgtattgacgaaatacgtctcgaacctgttgatgggctcgcccgccaaggttatcccgtattcttgcgcacacggcaggatttgacggtaggtttgcacacaccggtctatttcttcctctgtagggcccgtacccgtaaaacggcccagcccctcatacagcgggcccgcgatgacggttgcgccaaggacagccgccttttcgatgcaagccttcatatagcctgccgcggaaaggcgcagctccgggttggggcttatggggtccgctttatccgccggcattgcaatgatgcctgtcgcccccagcgaaaggcgttttagctcctgtgaaaagagaagggtatcctccggcgtcatgtcgtccagcgggaattccacgccgtcaaagccccattcttttatctgccgcagaagcggaagatgctcccttgtgggcctgtccgtccagagcagcaggttcatcccgattttcatacggctattcccccattcctttatagaaactgttccgcgtcagggtttgcaggcccgaagtgcttgagcatgacaagcgggcttttcttactgaaattctttatgacaacgccctttttcgccgcgtcgaagcatacatacatttcgtccgcggtaatatcgtcgtagccaatcatcgcgggggtttcaatttcaatcccgtttattgtgccgtagccctccatcataatcaatccgtaggccgcggcgtcctttatggttacggtctgccccggcaggacagtcagctgttttgcggaaaagtccttggagccatatacgacccattcctcacggcagccttcctcttccatttcctccaggggctttacggggataggctcgtgatagtggttctttttgaaatccgggtcgaggtttgcctcccagtcgatggaatcggcgatgtagctgtagtcgccctttttatcatcggaataaaacttggtcatcagctcgcgttccataaacttgtcgtgaaccatcgactgccagaaggaagatgtatcgctgacgcgctgcggctcgtaggttacgaaagagccgggcgcgtgtaaaataccagctggaatgttccagccggtgccgagcttcaatttaaacgccgcggaatgctcgacgattccattgtcgccatgcctgccccagtgggagatacaatcgacaatatcctcctttgcggtgcccggaagcaggccgaaataggtataagcgctgtggtagtcgattgcgtttagctgatatgggaaaaaatacgcctccggcttggaatgtgcgccgaccttctgcgcgtcctgctccaaaaggtgtacatggaacggaatcggcgcctggaaatcataaaatttggcaaaggactgcaggcagccgtacgcttccataatatctttacccagaatcgtatcgcccgccgcttcaatcgcgtcctttaatgtgaccagctcctctccgccgtttagcacgacgaagctcagtccctcgttttcaagcgtcagctccccgttgtccgccatgcccgtggaggaaagccaccgctcgcatacgccgccgtgctccgcgcccgcgcggtacaaatcgtccggattgagctttagccgcttcccgggcggcaggagcgtgcggtgcacccagcacggctttaaattgagcacgccgtttgaacgtttaatttcttctaaaattttatccctgatattcatcgtgaaaccttccttccggtgtggaataaattataaatcgaattggatagcaaagggcgcttgccccgccgttaagcagggcaagcacgttaaaagagcggaggtattatttaatatactcgtctacgttttcctttgtaacgactttcggctcaatcagcgtttctttttccactgtttcgccgcctatcgccttaataagcaggtccatgccggtgtttgcttcgccgtggaaatcattgaaaatggttgcctggatgttgccttccttgacttccttgagaacgtcctgctgggcgtcgaggccgtagattttgatttccccggttttgccggccgatttgaccgcctgcagcgcgccgattgccatgccgtcgttgttgcagacgagcgcgtcgatatttttgccggttgacagccagttcgatacgagctcgagcgcgtcctcagagttccagtttgcctcgccgtcgaataccgtcttatactggtcttccttgcccgcttccttgagcgcgtcctggtagccctctgtgatgtcgatttgcgcagtttgtccgagcggtccatacaggatgccgaggtctgcgccgttggggaaatccttcatgacctgctccatcttgagcttgccgcccgccctcaggttgctgccgacaaacgccgtgcagtcgtcctgggtcgatacggattcatgaacggttacaaacgggattttcgcggtcttcgcagccgcaacggctgttgtgataccgtcgaacgataccgggtcgatgatgatgccgtccacaccctccgcgatggcctgctcaatctgggaaatctgctttgcggggtcgttgtccgcgatgtagaccttgcagtttacgttcttggccttggccgcttcttcgaccgcttccctcaggccgatttgatactcgttgtcctggtgagggccgaaatacgcgatgttgagcgtttctgttgtgccgccgcttgaatttccgccggagctgttatctgacgccggaggcgcggagctttccccgccgccggagcagcctgcaaaaaccgcagtcacgcacaggattaccgccataaagattgcccattttttcatgcttttcataatttttcctcctttaatatattccacagccggtttttttctccgctcttaagcgtttcaccgacaaagaatcctgagtttttatgcttccgctcctttttttgccttgctgcgcaaatcaaggaacacggccacgacaataatgaggccctggataatgctctggtagaaggccgagacgcccatgatgtctaggccgtttgtaataacgccgataatcagcgcaccgacgacggtgccccaaatggagccgatgccgcccgtcatgcttgttccgccgatgacgaccgccgcgatggcgttgagctcgtacccctcggcggaggtagaactgccggaggagatgcgcgaggtcatcagcacgccgcacaggcccgcgagcagcccgcagatgacgaacacgagcagcttgacgcgcttggtattgacgccggaaaggcgtgtcgccttttcattgccgcctaccgcgtaaatccggctaccgattaccgtctttttaagcaggatatacccgataatcaatacaaccacaaagaaaatgacgaggtttggaatcccaagcacaaagccgtttgcaagctgtaaaaacgattccgaaataccgaacaccggtttgccgttgcataggacctttgcgacgcccctcgcaatcatcatggacgcaagcgtcatgataaacgatgggattttcaggtaggataccgcaaagccgttgattagcccgaacaaaacgcccgcggcaagaccgacaaggattggaagaatcagcggcatattttggtcggcaaggccgccgaacatggcggaacagacgctgctgaacgcaatgatggacgcgaccgacaggtctatttcgccggtcagtatgaccattgtcatacctatcgcgagtattcccgtaatggagctctgcttgataatgagcatcaggttctgcggcgtaataaatgtcggagaaaagatggtcattgcgatacataagagcagcagcacccaaaggattgcagtcttttggagaaagctctcaacctttgtttttctgagcgacaaattcattgctctccacccccgttgttataagcgtgcgcataggacatgatattttcctgttcaatttcctcaccggaaagctctcccgtaattttcccttcgtacatgacgatgacacggttgctcagcccgatgatttcattaagctcagaagataccaggacgaccgcctttccgcttagcgcaagattattgatgattttgtatatttctatcttcgccccgatatcgatgccccttgtcggctcatccagaataataatatcggggtccgagagcagccactttgccaatacgattttctgctggttgccgccgcttaaggacatgaccggctgtaaaacagagctgcatttaatggacagcgcgccgaccatctcttccgtgtcctgcattttcttttttttgttgaggaaaaatccccatttgctgttttccttttccacggcaaactcgatgttatcgctcacgcttgaaatcaaatcgaggccgtactgcttcctgtcctccggtatcagggcgattttctgtgccgccgcatatgcagggcttttgattaccatgtgcttgccctttacctctacagaaccgctgtcgggctttctttcaccgaagagcgtcatcatggtctctgtacgcccggcgcctacaagccccgcgaagccaacgatttctccgcgtttgacgctgaagctcacattctcgaactcgccttttcttgtaagcccctccaccttgagaatcgtttcgccgaacttgctgttcttcggcgggaaaatatcttctatcttacggccgaccatcaggcggatcaggtcgtcctccgtcatgtttttcgtttcatccgtatgtaccatgtagccgtcgcgcatgacggaaatcgtatccgtcagctcgaacagctcgtcgagcttatgggagatataaataatgctgattcccctgtccttgagcatatggatgagcttaaaaagcttttccgtctcgcccctggtaatcgaggaggtcggctcgtccattacgattattttggaatcgtaagaagcgattttcgcaatctctaccatctgcatctccgaaacggacaaatcgcgcatgcggcgcatcggagaaaaatcgaggtcaaaatcgcggagatactgctgcgcaaggcggttcatctcttttttgtctgcaaacccgcgcttttttatttcgcggccgataaacatattttccgcaatcgtcatatccggcgcgttgttcagctcctggtaaaccattgaaatgccgaggtcgagcgcgttccttgggcttgtgatttccgtcggctttccataaaggataatttctccggcggttttctggtattcgcccgtgaggattttcatcagcgtggattttcccgcaccgttttcaccgattaggcccttgatttcccctttttgcaggctgaaatccaccccgaacaaaacctggacgccgccgaactttttatcgattcccttcatctctaaaatcgtttcgcgtcccatggctacccttctttctccagcaaaatcattcctttgattttgtccttcgcgccggaatgcatgaattctatccctttcacggtatcttcaagcgggaaggtgtgggtaatcagcggtttcaattgcagcttgccggactccagcgctttcattgccgcgctccaggtaaagggggcaagccacgaaaaacggatggttttgtttgaggtgagcgtctcgagcgccggcacctctatgacgtcccgctcacccggcaggccgaagaaaacgatggtggaagcctttcccgaaacctcaaaggcgtttcgataagctgcctttgcgcttgtcggtacgataacccggtcagcataaagcccgcccgtcagctccttcaccgtttcttttatgtccgatgtatagtacaatgaatctttcttgagcgtgttatatacgtaatcggctccggtctgttttgccatttcaagcgggaaatcctcaatgtcagtaaccagcacctttcccgcgccgcgcagcttacacagctgggccatcataatccccatcgcgcctgaaccgatgacgacgacaaaatcgccaatttgtacgtccaggttctggatgccgtaacaggcacacgcaagcggttcggccatcgcgccctcctgatagctcattccctccggaagcttgaaaacgttagcgtacccaaccttgacatactctgcaaagccgccgtttacgcttacgccgatggtagaggtgttctcgcaaaggtttacctttgtttttctgcacattgcgcaggtattgcatggctgcggcggattgagcgttacgcggtcgccgggcttaaaaaagcctttttgcgcaacataggagcccacctcggcaatttctccgcttatttcgtgcccgatgatgagcggccccttgccgtcaggcgtttccagcggactttttccaaagtaataggaaacgtcagaaccgcagatgccgcacgcttttacctttatgagtacttctgtttcagaaatttgcggtatgtccgttttctggtactccatgtgttccggctcgtaaaatacgttcgccatcatttctccatttggcatatggcatcctccttcttcttttctgttatttaaaacgttatccttcgtatttcttttgcaggcttcttaccgtgtcgtaacagcggcgcgttacgttccatgcatccgcccagaagcaaaggtcgattgaaataaattcgccgctgtaaatttccggctttaaaagctcactgtaaaccgcgtccatatcgagcacgccgtctccgaagggcgcgtgcgtggaggtatcgccgtcgtgcagggttccgtcggaatcgattaaatgtaccattccgattctcccccgcagcttctgcatcaattcaatgacgccgccctggagcgtctctttttcgcccagctgccttgctccgaccacgctgcacatgtgtgcgtggcacgaatcgaacaggatggagaagttttcatccggcacatcctttaatattgaaaggatttcgcttggcttattgaaaaggaagcccggttcaaactcccagacgatttttacacggtgccgccccgcaaacgcggaaagctcgcggaaggttttaaccgtcctggaatacgcctggctatagcttacgttttccggcaggttgggcgggcacgccgtgtcgagccgcagcatcggaaagccgcactgttcaaggaacaggatattgcgcttcatccgctctatatagggtttggggtctatcaccggattgagcccgcacgggtcgggtgaaaattccgccgcctggagccccgtcctttggagcagggagagcagctctttttgtttttcccgcgtttcatagtcgtctaccagaatatgcgggcggaaccccgcgatgctcaccgcgtcgaacccaatgtccgaaagcgtttccgctacggtttcaaaatcgattggatggctttcatacgggccaaagatatacgcccacgtgccaattgcaagctttttcaccgttatcatccctcccggtaaattcctttgatttgctcatacagcctcttatatttttcatactccgcggaaaaagccggggccagctttctgtctggaagatattccttcttgacgtgcaccatatttttactggcttcctccatacttccgtagcatccgtccccaaccgccgccgcggctgccgcgcccagggcgcttgcctccttgcactttgtagcgcgcacagggacgccgtaaatgtttgccttgtattgcagccaaatgtcggagcttgccccgccgccgactgcataaatccggtgaagctttatcccgttttgggaaagcctgtccagatttgttttcatttcatagcttacgctttccataatcgcctggtaaatatcaattgctgaggagtggaggttcagcccgacaaccgcaccgaccgaaagatggtccatcgtcggtgtgcctgcaccggagaagtgcggcaaaaccagcagtcccgacgggctttccttacattggaggtcaagcgcgtgaaagctctctttttcgccggcctgcatcacgctttctgtaaaccatttgagcagcctgcccgccgtatgggtaaacgcgattgtattgaacatgccgtttaccaaaaacggctcgcacgggaagttcgtatctttaataaaatcaggttccagcttctcttccccaagcacagccgtaatacattccgaggttcctatggaatcggcggcttcccctttgtaaaacgcacccgcgccgattgccgcgcagggctggtcatgcccgcccgcgtatacgggtgttcccgagggaagccccgtgcgccgcgcgatttccggaaggagtccgccgattttcccctccgggttaaccggagaggaaaatagcgccggatcaattccggaacaaccaaataaagaagaaggaaacttcattttgtgaatgtcgaacgctaaggtcctggaagcaagcgagaaagaaatacatgcttcccccgtcagcatatatgcgatataatcgccaaacagcatgacgcgctttgttttttcatatagtccgggttcatgctcacgcacccataaaagctttaggagcgaataggtagcgttaagcgggagccccgttgtccttattatctcattttcattctttttgatttctggaagatactccgcgccgcgtttgtcgccgggcagaatggcgtttcgcaggacctttccgtccttatcaagcaaaacgcacgcttcccccaaagaggaaataccgattgcacgtatttcacagcgcataccggaaagcccgcgcagtgcatctatcaccgcgccgcatacctcttgcggacacagctcaagctgctgcccttccccacgcaccggatattcccggcaggcgcgctttatcatttcacccgtttcggaaaacagcaccgcctttacgccggaggttccgatatcgagccctatgtacatcttttccacccgctttattgaatgagttcgcggaactcctggatacgctgctttaaatcgcccttttggaacaggcacgaggttccggcgacgaagatatccgcgccggctctgcgcattttcagcgcgttttcaaggctgacgttgccgtcgacctctatcattacatctgtaagcccctttgcatcgagcatatcacgcaggcgggttatcttttcgagtgtttgcgttacgagcctttgccccgcaaagccgggattgaccgtcatgacaagcacgccgtccacgtcgcacagcacctcttcaatcatgcacagcggcgtcgccggatttatggcggccatcggccgggcgcctgtttcccttatttttgcaagcgtgcgctgtaaatgccgcgtactttccgcatggacggaaacgagctccccgggctttaaatcaaaccatgcaagcttttcctccgggcgttctaccattaggtgtatatccagcggaatagcgctggcactgcgcatctgccttaccgtatccgtcccgagcataaagttcggaacgaactgcccgtccatcacatccatatgcaaatactcaacgccctcgcgttcaaatgttgcaagcacctgcggtatttccaaaaggcccgcgcacatcatagagggagaaagcttcgccttcataaaagacacctcctagggatgcaccaccacgcgcatacacgcgcgggaagccgccgtatcaaacgccttttgaatgtcgtcgagcgaaaagctgtgcgtaataaagggcctgacgtcgatggtgccgctgcggatgagctccaccgccttacggtgctgccgcggcagcgaaccgtgcgagccgtgcacaaacagctctttataatgaatgaggtttgtattgattgttacattggacgcctccgccggaaggccgccgaagaaattgatgcgcgcccggttcttcgccatccggatagcgcgttcctgcatctggggtacaggcgtggcggtaaaaataacgtccgcgcccaagccctgtgtctctttaaggacagcgtccacgatatcgcattcggaggggttgataatcacatccgcgccgtttcttgttgcggtttcctggcgttcagccgcgcgttccacgcatatgacctttgccgcgcccattctttttactacgggtatcatcatacagccgatggggccgcagccgataatgacaacggtatcgccaagcgatatgcgggattcctccatcgcgttgagcacacagccaagcggctctgccagcgcgtattcatcgaaattgccgtcaggcgggataacatggacaggtccctgctccattaccatcttgttgagcagcacgtactcggcaaagccgccggcatactggtagcccatcgcgtagtttgtctgacagttgttgccgatgccatcctcacagaaggagcattttccgcaggggatgtccgcgccgattgcaactttatcccctacctttattttatcaatgtttttaccggctttaactacctcgccggaaatttcatgacctaatatctgtggtaattttaccctgctgttgccgctgcggtaaattctcaagtcagagccgcataccgcgcatgcgcgaaccctgaccaaagcgctgtcgtcgtcgcacaggggcgtcgggacttcctttacaaccagctttcccagctcttccaaaactgcagctttcatctctccatccctttcattgattgataaacatgactttcacagtaaaatcatcttttgaggtcagtgcgtcaaacgcttttttatgttgtgcaagcgcaaagcggtgggtaatgagcggttcaagtgcaatcttgcctgtttctatcccgcggatgacgcgcgtccagtcgttgtccgtaccgccgtacgaggagttccaggtaccgagcagcttcagctcttttctgagaatgcaccaatacgcattttgggaaaggcgcatttcgccgcctggatttccgaccgtcacaacccttccaaatatatccgccgcgttcaggcaggtttcaagcgccggggaaacgcccgcgcattcaaacgccgcgtcaacgaacctgcgccctgtcagcttcataagcgcgtcctgaacggcttccttttgcgtgtcgaccgtgcaggaaaaaccgagtttacgcgcaagctccaggtgcctggagctgatatccgcgataacaacctctcccgcgcctgccgcgcggcaccacatggccgtgattaagccaatggtccccgcgccgactaccaggacattgtcacccggccgcagcgccgccattgccatcgcatggtaagcgacggcagccggctcgcacatagcggcctgttcaaaaggaacgtcttttgacacctcaacgaggttccaaacgggaaccgcgagatactcgctgaagcccccgtcacagcgggaaccgaaatagctgtagctttcacattgcgcataattgccggtccggcacgaagcacaggaaaaacaaggtaacagcggaaacaccgcgacatgtttataaagccatgacgggtcggctccctcccctgtctcttcgacgattcctgcaaactcgtgcccggggattgtgggaaaatggtaggtgccttttgtaaggaccctgggaatgtcgcttccgcagataccgcttgccataatatgtacgagcacctcgccttgtttgggctgcggctttgccacctcttcacatcgaagatcgccggctgcatggagtacacaggctttcatatgtaacacttctttcaaaattttgcaagttttctctattatctattgaaattcgcgttttatctcgctatactaaagacaacaggtttcattcttttgcaatatttctttcatcgttctttttgcgtctctcttttgtacagttttattatagtaatccccactttatatgtcaactgtgtgcggtaaaattgaaagttcgacattattcatccataaaaattacataaatgaacaggagtgtgcagcatgttcactttagagcggcaaaatgaaattatggaaatcctgaagaaaaacaagtttatttcaatcaacgagctggcgaagcgcttctatatcagcacggcgagcatacggcgggatttggaaaagcttgagcagcagggacttgtaaaaagaacctacggcggcgtaatgctggtagagggcgttcatgcggaaattccgcttgttgtgcgtgaagccgaacagaaaaacgcaaaaatgaaaattgcgcaggcggccgcatcccttatcagaaaccaggataccgtttttttcgactcctcgacgacgacgcggcaaatctgcggttttctcggcgataaatccaatttgaccgtcattacaaacggcatccgtgccatttccgctttggcggaatatgacaatgtggcggtttatggtatttccggcaagctgcgccaccattccctgtcgatggttggcagccaggcggagagcttcgtcagggatttttgggcgtcaaagcttttcttttcctgcacaggtctttccatgagccatggcgccatggattattccgacgctgaagcggaagtacgcaaaaccatgatgaacgtctgccagaaaaaaatccttttggttgaccatacgaagctggagcgccctgcgttttaccgtatttgcagcttttcagatatcgataccgtcatcaccgataaaaaaccaaacgagaaatgggaacagctttttatgcagaacaatattaagctgatttgtgtggaatcataagggattgagcgatttggcgaaatgctgtttatacaaggggaaccgggtaaggcgctttcttgttgtagtattgtccctcacctgttcatctcgatggctggcagtttttttgatacatcaaagcagctattcaaatataaaaaaacgcgggaacgaaaccttttgggttccgttcccgcgctacattttttattcgttctggtttggggtatttcgattttgccagagaatgtgttacctgttaataatcagaaaatctgctccacggcaaagcagtcgattttctttgcaatatactgctgaatcataaggacatcctgcagcgtaatgctgccgttgctgttgacgtcggccgcgtccttttgcttgtctgtcaagattgcggctcccgccatatagttttggagcctggtgacatcattgagttcaatcacgccgtttccgtctacgtcgcccaaaagtgtatcacgcaccgttacgttaaattgataaatttgattcgttgccgtattgcgccccgtaaccatcgcagtaccagcttctaaggttttcattttttgtttgatattctggtcaaaggttacagtccgtacaccattaaccttgggcgcggaataataaatgtcctggcaagtcgcgttttcaggagtaaattcaggataaataaaataacttgctcctatcccaaacgatttctgaatttttgcaaaagatacgctctgaatcggtattttttttgcggtactgctgttaataacaatcggagaatttgcagttacgaggatatagatgatatcagaagagtagaaggctacgtcaagttgcttgtaattatatgagttgacgttaccgtcggccggtgtaatcatatcccatgtaaccgtctccggtgtatagccttcttgcagctggattaccttaccgcctgtacccgctttatatctccagcagctgctgccgattctgcgcataaagtggtaattataactgtgcaaatcgcctgttttatatatgcttttgggagaaacccgaagagccatcaggaactggttggaggccgtcggatagttcggcctgctgtcggctcctgtaagaatccttgcagaggcgcctaggtttttcacatcctgcacaacccagtctgccactgtgttgacatctatatactttttccttatggtattgagcataatgccgctggcagtcgtctcccctggtgaaagagtataattcgttactcccagcgcgtatggatagcagtaaaactggctttgtgtcgattcatcataattggttacccactggtgtgtatcgtatgtaccatcaattgacgcaacttttttaatcaggtgcgggttcttactgtcagggctgacatttgtcgcgtcaaacgcaaaggacgcggctgtactgccagctaaaagaagcatagccattaaaaacgcggttgtggttttcagcaaccttttcttactaatcattaaatcctctccttttctttccttttcttttaccccaaaccgagcatctctattataacaaaaataacaaaatatttctacatatttttgtgaattataaatataaaatggatttttataagagttaagttatatttttatcgaatatatattgtattccatttttattataataaaaataatagctttcttttgttttatagctactgctggaacaggcgtgcgaaatcagaatctcgcacgcctgttctctttttgatatactgattttggggtggttggtcctacttacatttatcagccgttattattaaaaaatctgttctaccgcaaagctgtcgattttctttgcaacatactgctgaatcataaggacatcctgcagcgtgatgcttccattgctgttgacgtccgcggccttcatctgtttttgtgtcagttccgcggctcccgccatatagttttgcagaagcgtgatatccttgacttcaattgaaccattcccatccacgtcgcccagaagcacgtcgctcactgtaacgttgaattcatagtattggcgcgtatccacattaaaggccccaaccgtgacagtaccggctgccaaggtcttcattttatgattcaccttggaatcaaatttgactattctgaccccgtttacacttcgcgcgctatagctgaaattctgataagacgcatttacgggagtaaaggctggatttattaaatagctggcgccaattcccagcgactgcggaatattatttgtaaaatcaacggcttgggttgtcactatattgaaggaatccgcggtaatctggatgcttgaatttgccgtgactaccatgtatacaatatcggaagtataaaaaccagctgcatattgcttataattataggaagaagcaactccgttgtccgataccagcacgtcccatgttaccgtctctggcgtatatccctcctcgagctgaatgaccctgccggtatcgcccgctttatagcgccagcagccgtcgcttattctccgcataaaatgatagttatagctattgatgttgcccgtttcatatgtactcttaggcgagactctcaaggcaatcaggaattcattggattttgttggataatccggcctgctgtccgccccagtgagaatccgcgcggaagcgccgaggttttttacgtccttcaaaacccaatctgcaactgtatttacatctacatatttttttagcagcgtgtttttcaacatatatccagccactgtgtctcccggagcgagaagcatatcggttactcccagtgcataagtatagcaccgaaacttcggctgtgtagcttcatcatagtctgtaacccattgatgcgtatcggagattccgtcgagagctatgactttattttttaaatggctgtttacactgtcagggctgctatttgttccgttgaacgcaaaggacgctgatgtgcttgcggctatgagcaggcatgccattaaaaacgcggctaccgacttaaaccgtctttttttatttttcattattttccccctatcctttctttgtcaccccaaaatccaacaactatattatacaaattccagcaaaataattccacttatttttgtgaatttcaaacatacaatgtaccttttaaagtgctggtttatatttttgacaaatatatatcgcattcccattgaaaaaaggtgaaaagcaaggaaggaaatgaaagcgtacagcgttcatttccttcctatgaataagcggttcaataatcgttgcacttataaatccagcgcttcaaacgattttgccgaactccggtacgcaagaaacgtcagcagggcatacgccgcagctcctgccagcagcacaaccagcttcggggcaagatactgcgttcccggctgattcagctcaatttttacaaacggaacaatatgcgtgctggtttcgacgaccagcatacatacggcaaacgcggcgcatccatgtaaaaaagcctgcccaaccttgctcgtatccttgtaatatttcttacaaaagaaaaaattgaacaagccgaacataaggagcgcaaaaccaaagaaagcggcgtttgcgttcatcccgaccgcgttgctttccggtaccagaacgccgcgcagaaccgcaaacggcacggcaagcagcagctgtgcggcttcgagcaggacaaccagtaaaatccgcgcgcccgcaatattccgtttgcggacaggcagcgccatcgtatagtcgatatccttgttttcgcgcccggttaaacaaataaagaagacgccgaggctcgtgtaaaagaacgtgataaagagcggataattcggaatcagcatcatagacgaaaggcacaggaacatcactgacgcaggatgaagagaaaggcacatctctttgtatagcagttttttcaagctcaatcactccttttccagatgaaccataatagattcgaggtcagccggacgcagatgcaacccgggaagcggcaaatcatcagtttttacaagcgctgtataaccgtcacggtttcttttcatgccgataagttttccggacagcgccgaaacatcctgctcttttttcagcgcaacaaggcggaacttctgctggagcgcctcggttttgcagtcctcaataattgtcccgtttttgatatagacgatatggtccgcgcatttttccaaatcagatgtaatatgcgttgaaaacaggataccaacctgtttcttctccgcaagcgaaaggaagacgtcgagcaggtcgtcgcgcgaaacggggtccagcccgctggttggttcatcgagaatcaaaagctccgcgttatgcgaaagcgccagcgccagcgaaaactttaccttcataccctctgaaagctcgtgcgggtttttttgcccatcaaggccaaaatccgtcatataattttggaaagcgctgtcatcccattcgttgtaaaactgtttcgtcacagcggctatggtacgaagctttttccgcgggtaatagtcgatgccgccggagacaaaaccaatcctctgcttgatttccatctcgctttgagaaaaaagccggtcaaagaaccggatttcgcccttgtctggatggacaaaattgagcagggatttcagcgtcgttgttttgcccgcgccattgcgcccgataaaccctgtaatagaaccgggcaagacctcaaacgacacgtttttcagtgcaaagctttcatattgcttacataggccgtttacagacaactgcgtcgccatcttatttctcctcttcttccgttggtttcgtcgtacccgtctgggcattaaaaatcgcttccgcaaagtgcttaaacgcgctgttgttgacgatagcgatgccctggtcgatatcaccaagcagcagcagtgtgtcgccgggtttgatatcgaatacctcccttgcttcctttggaattacaatctgccccttttcacctaccttagctgtccatgcatattttccctgaggcatacctgtgttcattctaatccctcctcgtatgaaaagtatgatttgttatacttgttggatatattataccccaatatggcaaagatgtcaatcgccatggtatcaatatttctcaaccgtctatcatccggcaattcaaaaatatggacgcaaataagcggatgaaaagcgcataacacagcgcttttcatccgcctgggtttcatctatttaagcttgtgcgccgctttccattcgaataacggggcagccgtcaaccagttccctgtaacggtggcaggtttccgtgtggtcgtttacaatcccgcaggcctgcaaatgggcatagaccgtaatggagcccaaaaacttgaaaccgcgctttttaaggtctttgctgatttggtcagatagcccggtttttgcaggcgggtttcccttttcatgcccaacataaagaaccgtccggttgtccgtaaagccccaaagatagcggtcaaagctgccgaattcctcccgaattgaaaggaagcaccttgcgttatggatgaccgcgtcgattttccttcttgagcgaatcatatttggcgtttccataatgctttggattttatcttcgccataaagggcaattttttcataatcgaacgcatcaaagcattgtttgaaggtttccctttttttgagcatcatcagccagttcaagccgcactgcataacttccatcaaaataaattcgaactgctttcggtcgtcatgcacgggaacgccccattcttcatcgtgatacgcctgcataattccgccgtcctcacaccaggcgcagcgttttaaattttgcatatttactcccattcaatggtcgcgcacggctttggggaaaggtcgtaacacacacggttgacctgcggcacctcagccagaatgcggtctgtaatcttgattagtaccggccagtcgagctgttcgattgtagcggtcatcgcgtccacggtattgaccgcgcgaataatgaccggataatcatagctgcgctcgttgttttttacgccgaccgatttaaaatcaggaacaacggtaaaatactgccaaacctttttgtcgagcccggcctttgcaaactcttcgcgcaggattgcatctgcctcgcgcacagcctccaggcggtccctcgtaatcgcgccaaggcagcgtaccccgagccccgggccggggaacggctggcggtaaaccatttcgtagggcaggccaagctctattccgcaggcgcgcacctcgtccttaaagagctggtaaagcggctcgaccagcttgaactgtaaatcctccggcaggccgccgacattatgatgggatttgattgtcttcgcggtctttgtgcccgactcgataatatcagggtagatagtaccctgcgcgagaaattcgattccgtcgagcttgcgtgcctcttcctcaaatacgcggataaactccgcgccgatgattttacgcttctgttccgggtcggataccccctcaagctttgtaaggaaacgttcggctgcgtccacgtatacgaggttcgcgtggagctggttttggaagacctcgataacagcctcggattcccccttgcgcatcagcccgtggttgacatgcacgcaggtgagctggctccctatcgcctgaaccagcagcgccgcgacgacggaggaatcaacaccgccggagagcgcaagcagcacttttttactgccgacctgccggcggatttgctccacctggtcctggataaagtttttcatgttccagttagcctgcgccttgcaggtatcgaaaacaaacttctccagtatttctttcaggctttcgtcgtcatgcggcagaacggtattttcgacacgggagggcgcatgtccgaaggaaatcaccggatatcccgcggtatataacccgtctgtcacgtcgattggctttccatcgacgatattgttctccccgccgcttaaaataacgcccttgacgttcggcagggcgttaagctcagccacggtgatatcatgcggcttgatttcgctgtaaacgccaagctccctgataatgcgggcaatttttgtattttcatggctgccgagatccaaaatgactatcatatcctgtttcattgcactttcccccgttattgtatttacagtaatttttcacgcagctcttccggcgttccctgatgcaggtacgcgggcgcgatatccagaacggtcttgcagccgaactgcccttccctgttgaggcggtacgccgcccttgcgtaggcggtgagcacactggcggtaaattccgggttggaatccagctgcagacggtactctataatatgtttattttggtgcgcaaggcctgtcaccccgcttctgaataccacgccgccgtgcggaatgcccttgtggttcttcagcaattcctcttcactgataaaatggacggtcgtgtcatagtctgcaaaataattcggcatggtttttatggcctcttctatcgcctgtaaatctgcgccgtcctgcgcgacgacaaagcattcacgcgtatgcttcccgcgggttgtgagcgttggattttcaccgcggcgcacactgtttaacgcttcctccaccggtatggtatattgccgcgcgtccctgacgcccggaatacggcggattgcgtctgaatggccctggcttacgcccttgccccaaaacgtatagtcctgtccatccgggaggatagcctgtccaaacatacggttaagggaaaacaggcccggatcccagccgacggaaatgatactgactttcttgctccttttgcttgcttcgtccaccctgctgaaatgttcgggaatttttgcgtgggtatcgaagctgtcaattacattaaaataccgcgcaagctccggcgtctgctgcggcaggtcattcgcgctgcctccgcagagaaccgccacgtcgatttcatccctcagttttggggcttcctccatagaataaaccggcacaccggtttcggtccttatacttttggggtctcgtctggtaaaaagcgcaacaagctccatatcgccgctttgagcgacagcgctttctacgccgcggcccaggttcccataccccgcgattgcgattctgattttcaaaacaaatcttcctttctgaacatatcacataggatagccccagcgtttatatgtaagataatacagcggaagccttgcggtaaaagcggcgtccgccgttcataacagataaattattatagcatagcggacggactctttcaagctaaaaccgcttgtaaaagacaataagcgacagtctcgcacgcataatcccgacaaatacaagagagccagccggctgataaaatcagccggctggctcacaagctattggaaccgccttcctggctttaggtgtttgattacgcgcactaccagcattttgttcagggcatcaagctctgccttttgcgctgcgagccgctcgttttgcttttttaattgcccttttagctcgccttccttcttccggcagctttccaagtcttttcccaaagcagatagctcctttttatactgtgaaatttctttttccttttttttcaggtctgtaaatctagcaaggtattgcttttccgccttttcaaccttaaaaagcaggtcaaaaacgtcttcatctatactgccggagttttccgccaaaaccgctgtaacttgttcaaagccgtaaatttctatgtctgcccctctgtccttcacgacgctgcccaggagcacctgatataaataacggtataaggacatcagatattcctggtaagccttctcctgtccagaattcttttcaggctgcaaaaccgagcgcagcttatgaaaaacctcctcgctgtcccactgttcaaacgcaaacgcgcggtccggataaccgatgttttgataaaagaacgggattttatcattccacacaagcgcaatcgatggaattccgaaggaatacgcaataattgaggaatgcatccggaaagtaatgacagcggaaaaccgtgaaaccgtttcgaccagctgctttgtcgtatgcggataaaaggtacggcctgcgggaatatcatactcccgcgcgaaatagcggagggtattgttgtccaaaacgctgccatttgtataaaagagatattccatgccggcttcctccagcaggcttttcagcttatataaatacttgaattcatccgtcataccccattttttcttgttgtccagaaataagcctccgcgcacgacgttgattccgattactttactatcagagcaggggtttatatgataaacgtatttcgtccaaaccgcggggtcgcagacctgctctatttccaagccgcagccttcggcatattgttggaacaagccaatgttttcgcgcacagaaaccgacgcgatgcatctgcgttttaagatatttctcagcttttcttcgttctccgcggttgcgtccatattattgattccaatcgatgaaaaaatgacgggaatcccgtggccttccgccaattgcgtaatttcatcgaggtaatcgaaaaagtttaaatagctcaaaccgaacaagccgccgccagcaaagaaaatgacgtcggaaccggtaacaagcgccctgtcgattcttttcagcggcattttattgatttcgtaatcattctctgccaagtgcaggttttttaatacgacctttaacaggctttcaaaacatatcttaattaaattatcgccaaagttatcgtcaacaaaagaaacgattaaaattttcatagcaagctcccggttcgtttgatgctttgatattagcatacttgcctgagccggtcaacagaaaaaagtccgctcaaaatacattaccgcgtgtttggacggggctttttaagccgcgtggtatctttatcgtcaggcttttctgcaatgcacaatccattattttttcaaataacccaaaaccccgtttgcgaccaagccctgcgccatttttaaaaactcatcatttgtcaaatcgtttccgttttcataccattttgccatcagcccgatcatggcagagtaggtatattccatcagataatccaaatattttgtttcttccggcaaattccaaaaatggataagcatagaccggaagttttctttgaatttacttgtaaatttgggatctccgtctttgccgagcaaggtaaataatttttcttcatgtcttttgaaaatcggcgcactgaaggaatacagcagattgatgtctcttgcgtcttctttaaaagcataattgctcaaagcctcttttacttccgtattcacctgcttaatcaaaccatcttctatctgctccagaacatcgtaggcatctttgaaatagtgataaaaggtccctctgttattccctgttatccttgtgatttcggcaattgatattttatcaattgctttctctttatagattgaccaaaacgcatccattaatttttgccttgtggcggcagtaacttccggctgttttttcacagtgcccacccctttccctattctaactttacagaaatccgctttcagcatcaagcaacagtgtgtttaacattgttgcttgatgaaccgcgtatatttgtctataatggcaattgtacaacatactgttgcataattcaaggcgaagatcggagagatacaaatgtcggttattgaagtcaatagattgacaaaagattatggacacggcagaggtgtgttcgacgtatccgcccatgtggatgaaggagagtgctttggatttctcggcccaaacggggcgggtaaaagcacaaccatcaggcatctaatgggattttcaaaaccacagcgcggaagcacggtcattgacgggaaggacagttgggaatactcggcggagctgcagcgtaacatcggttatctgcccggtgagattgctttacccaccggaatgacaggtacacagtttttagtaatgcaaaagaaaatgaggggcttaacagacacttcctacctggggaaattactggaaagatttgagcttgaccccaatattggcttaaagcaaatgagccttggtacaaagcgcaagctggcggttgtgaccgcttttatgcacgacccaaagatattgattctggatgaaccgacctccggcctcgacccgattatgcaggaaatcttcatcgattacattcttacggtaaagaagaggggtaaaacgatattcctgtcctcccacatttttcatgaagtagatgcttcatgcgaccggattgcaattatccgggatggaaaaatcgtttcggaattcgaccccgaggtgttaaaaaaagaaagcgacaaaatttacagggttactttcgacgataaaaaccagtggcgggagtttacatctcactcttaccgctatacttctgtgaacgagcataagcttcgtgcaagaattcagcttaaaagcagcgaaatcaattcatttcttgctgatatttcccagtttcatatcaaggatttcacagagttccccttttctttagaagattacttcatgcagttttatcatgaggataaaatttttgagggggtgaagtgatgaacgatattattataaaaacgagtgacctgacaaaggattacggcaaaagccgcggcgtgtttgatatcgatatcgaagtccataagggcgaggttttcggctttatcggaacgaatggttcgggaaagacgacgactattcgcaatatgatgggatttatcaagccggacagcggcatttcttccataaacggcttagattcctggactcagtccgctgatattatgaaaaatgtcagctatgttcctggcgaaattgcttttcctgcgttgaaaacaggaactgaattcctgaaaacgcaggcgaagtatctcggcgtaacggattttgaatatatgaatcatgttatcgagctgttacagcttgacccaaccgctaatttaaaaagaatgtccaaaggaatgaaacaaaagaccgcaattgttgccgcactgatgggagaaaaagaaatcctcgtgttggacgaaccgaccaccgggctcgacccactgatgcgggaggcatttttggaactgattcgtgaagaaaaacaaaaaggacataccgtgtttatgtccagccacatatttgaggaaattgaagcggtatgcgacagggttgccatgattaaggacggacatatcatcgctacaacatctctgtatgatttacgccatccaactgttaaaaattttaccgtagaatttgagcaggcatccgaaaaacaacgctttattgaaaatgcggagttcaagactgaaagcatagacgcaaaaagttgtaccattctttgtaaaatccagcagctggacgcgttgtttcattcactcaaggattatccaatcgttaatttacaggagattcaccgctctttgcagcagcagtttatgagcacatataaggagggactcatccaaaatggaaacaactaaaaaaacagcgcggtttttctcaaagccgttaatgaggcagaatatcaaatccaactgggcattgtgtcttgctattttacttatcatggtacttttaggaaatgttatgaattatgccatgagtatgatggcgaccgaaaaatccgatgttgatgtcacagaataccaggaaagcttttatacttacctcggagcgcttgcagcgtatgatacgatgacgcagcaggagctgtcatatgacgattttgcaaatggtaataataaagccgtttatgagacagcttttggaatgctgaataagcaggcagcaatggacctcagtatagaaggctttcaatctgcaatcgatgggttgtcacagtccggcatcagccttgataaatatgtaaagcagtttgaatatgtatatgccttgaaacagtcggaaggcgtgtttgacaaggaggagctgacagtttccggaatgcttacaatcacgctggacatgatgggtgtttcatcagaaatggttgagaagatgagtgaaatggatcctgcggctatgatgaaccagatgtattataccgcaatgggcttgctgccgatttttatccttattgtcattttggcaaattctctgattgcgaaccaggtagaccgtggctccatggcgtatgttctgtctacgccgaccaaacgctctgctgttgccataacgcaattggtgtttatgcttattgtaccgcttttgatgattgccgtggtatgcgcaacccggataggaacctcatttatgttttatgacgaagtaaacgtagcgggaatgcttgctttgtttggcggtatgtatattctggttgaggcagtatgcggtatttgctatatgggaagctgcctgttctcacagagcaaaaaatcaatggctttcggcggcgggcttgcggtttggtttttccttgcgtccatgattggcctgtttggctcagaaaatatggtcaacaccggcatgggcgttaaggagctgagtatcttcaacaggctgacattggtcggattgtatgatgtaaattccctgtcaaccgtcggtacaggaaacgtggatacctcatttgtttggaagctgctggttttagcagttatcgcaatcgcttgctatacgattggcgccgtaagattttccaaaaaagacttaccgttataaatttcattgtggaagggcggcaatccaagcaaggattgccgccctttttcttatacccctgcttataaaaaacagcagaagcgttatttgatatagaattctgcattacgcaaaatacgccttattaaaatacaaaaaaacatggaacacgctgaaatagtgcttttaactctttattacgctttgttacagtttataaaaatcaaagtgaaaacttatcgtctcaaagaaattattttctgcgagaagctctgacaaacggtgctttgacatcttcttcaatcagtaagtgatatttttggggctgcctgaacgcattactgtgtacttcattgtttcggtaatctcgaatcatcgcaaggtcaaaatccgcaatataaacgccttcctctccacaagcttccaaaatacacatatcttgtttgctggctgattttggacgatatgccactccatcaaatgcgcttgaatgtccattgcagccttgtaccgctttcggataattgcaggtggcgatgcccatcatattttcaaaggctctgccgcggagctgggaaaggcggttaatctccattgaacaggcatttggaaccaacacgatttccgcacctttgagcatcaatattctagcgctctcgggaaactcccggtcatagcatatcataatgccaaccttaacaatgccggtatctgtatccaagtcagcaacataaaaatcgctccccggcgtgagagcccgctccacatcaaaatcgcaggtatgtacctttgaataatctataacacggctgccattgcggtcaaacagggcaattgaatttttgggaccggtttcgcatttctcaagatatgtgattccgattgccatacgaagctctttagcaagtctgccgaatgtgtttataaaatcgctgtccgcgggtatcgcttccgcttgccattcttctgcaggtctgtcatagatattgtagccattgctccacatctctgggaacaatgcaatatccgcccccatagacttcgcacttttacaagccgctgttcctttttctagattaccggccaaacctcccgcaggtgcaatttggagtaacgctacgttcaaataacccatatttaacctttctttctgttgacaaattgattattatctcatattcatttttatagtattatagacctgtccaaaaacatagagggcaggcaatcactttatggcttgcccccctgattaccacagagcaaaaccggaatctagttattcagcagttttgttaaatcctcaatagaggcatccatttttaccgatacttcttctatcgtcataccagaggcaagaaagcgatttattaccattttcatatcttctccaacctctatgatatgtccgtctaaatcataaaatctgataacgcgctgcccccaatcatgctcaatgacttcccctaagtactcaatgtcaggatacttttttagcttattcaagaaaccgtcaaagtcctgttcctcaaagcatatttctatattattggattttttcaatacgttttctttgggtaaaccgacaagccaattaaagtcttgctgcaaagccaagccacaggtaaaggatatatttattccgtaatcctgataaatttccagtccgaacaaatcttcgtaaaaatttcttgcggtatgaatgtctgctaccgctataaccatacaagtgtgtttcaaattattgctcctttcaaattccgatttgcctctctgttatttgaaaacagtatatcacaggactgcgcataaatctacttttcttacagttcatcacggctgaaagagaaccgtagccgttttctggctttccctgcctgttctctctgtttggtggttcccaacgccgaatactttgaatgggaactgaaccggccgaggaatttcgacgattgcggaaaatgtgagcctgacgttttatggcggaaaacagaaaattataaaacggtcttgctgaacgaaaatcagcaagaccgttttatatggttggagcttacagacacttacaagccgttcgctatccacaataagtgccaaaaatgctcctgttatcaaaaggcaaataagaaccccggaacccccttgtttagcgagcatccgggattttatagcttactcccactcgctaaatgaatacaggttctaaacaattttgtttgggtgatttgattctcatttgctcaatttaataccaattatccataccatacaggatttactaaacttctgttatcaaaaagctatcaagggggtgttatcgctaatttgtaaaaggccctaaactcaacgagtttttacgatatcatatccatcggcatcattttcacttttatcatatgcattatctatgtactttgaagggttagaaagaaatgtttcttcttcaacataagcgatatatgagcctgttaacgcatcaacagttttacaaacatcacaactatattttttgggattttgattgaaacgattattattgattattgaatatactttactttcatcataacttgaagattcacaaccatcagctttcttggatatactcttaaaccaatcataacttccattttgtttcataataactccaaccacgccattggtatgagaagttcttcctttccgggtgttattcttaagacaatattcaatttcccaatcaatccatttgctatctttcatgttaggagatataattacaatcgtaacagatgtgtcatacatcatgtcccttaggttattcttaatattttccgtagatgtatcagttaaatcaggagaatcggaagtttccccttggtaataagtagcatcatcgcccaatgcgtcaataatatcatcacgcaaattttgtgcctcgctatatttgtacgaaataaaagttttatgtgccatatgacattatctccattccttatttttaatacagttttttaaaaaatctagttttatcttggcgctttatttgcaagggcattttcaattaaatcttcaatgttatctttaatatcatcgtatacgtaagtgcttgtcttatagcttgagtcaaaacaagtaacgtaattagaaaggcgtttactttcttcgccaatatagaactggtagaaaggattgctaccctttgacgtttggttcccatctgcatctttaaggttatgaatgtaaattcctacaatgcctttatttaactcataagccttttctatttcgtactttatccatttccgacctgatgtcgttgctccaattaaaactacaagacaagagcgcttagccatttggttatctatccactctttaatttttgtgtcacttttttcttttacttcttcccaatcattgtcagaaaaggttgaactctcatctacttttcccatatttctaacctgagatgctctccaagcatctttgttgtattcaaaactaaaaaacacttgtcttttcaacgtatatgccctccctataatcatttaattcaatgttaccaatattatttattatctctaatattgcctgtgtcaatttttccggatcagcggtagataaaacgtctaaaaaatcttttaaatatgaatactcatcaatgtgttgttgtacttccgcataaatcagttctgaagctccaccagtgcctccgacaggtattacatatttgtttttctgttttgctataccaaattcttgtaacaccccattggcgttaataatcttaccatcaaccaatttgtttccaaataaaaaaataacaattccaacatcatcaattatatcttcacgatattgttgccatagttcttctcgtgtcactgaaccaaccgcaatttgagggaagggacgtaaggataggtattcgtcaagatgtttgtacttgcttgacattatttcttctaatgccccattcacaatgagtgatccaactcccaacccaaaacctgaaactattttataacctttttcaactaatgatcgacctaatttaaataagaaattgctaaattttgtttcatcccatccggaaggcaaatatcctgctgctgaacttcctgaaacaaatatattcttgagcaaacagcaacgcttaatttttaagagaatgcttgttatttctctgaaatcatctatcaatattgtttgaatcccatatctctgtaaatctttaatgcgtaagtcctgttttacagaatcataaataaaccgctgttcatcgtcataatcacttttacagacttttctcaaaatacaatagtgatcccggacggattcatctaacaatacttttatagagcttattatataatcaagatttggatcttcaaaactaaagccaataaacaagaaggtctttgatattaaatcacctcttaaagcagtgcgaaaaagtgaatggcttactccgtacttatcataatcatcttttgtgagaacagcattgtcagggtcacgtacatcaccgtgcattttatatacaactgcatctctatcgcatatattattagataagtttttctctgtaactttaacatcagcttttctattgttagattttaagccttcttcaattaaacagtcataatttgttgtccaatatgtacttattggtaactccgtaatgatgttaacgtttttattctcttttgtttctgctgtaaaattgttaagtatagcttgattgatttgattacgattcccttttgcgttgcgataatattgagcaaccgctactaaatcattttctttctcaacatccaaaccaatttcttctgccattggttttaataaatttttccaatcaatatagcctgacgaccgtgacaatcctgcacctgcaaaaattgctgcatacccttcagttatcgcttttgtatattcttttacgaaattttctatcttgaccatagttcaatcacccatctaatataaataaatactttaagaatctaaatttatatattgtgaaaattataccatattaacgacaaaaaaacaagctgagtgtaattattaagagatgggcctcaggattttatttccagaggcccatctccgctaactaatatcccttatcacactttgctgaggaaagatgaacgtatcaagcataatacccgcaccaagccggaatccctcaataaaccgctcaatttcggaaaattggctgagttcactttgggcatttatcatctgtgacagcaaatgctgttcttcttccgcgttgggtagagcattcagaaaagctgtgagcttttcttcattatccgtaacgatttttacgaactgggagtatcgggatttccggtcaaagcatttctcattgggattgatattgccatagtataaatcttcaaggatgttcatgccagcacccccagattctttagcagccaaacgcagtcttttaatccctgctgataaaggagttcggtttcatgctctgcggctaacccaaactcaaataaaacttcttctaccatatctttttcatctttggtaaggttcgtggtcagcatttcgtcaatatgttcccgtcgctgcttttgatattcatattcctttgtcgtttggagatttttcagtgagcaagatagtagattacttaagaactcgttccattcttcatttttgctcatagctataaattcctttcaaaatcgtgcaacccttgaaagaaatcacagcgcatggtataatatttacgctgtaactgtcttttaggcagttgccgtactggaagtggctaattctttgacgaggaggagccgcttcctttcattttttctttaggtcgggtttcaaccgtttaattccacgtcttgctgcttccattacagaaacagattcctgttcgcaataggcatcgagtatatctttcgcctcttgatctaacttcacgcctattttatatggctttggattatcggttggccgtcccatttttttcttgtccaattaatcacctcactttgggacaccctaagtatagcacttaggatgtcccaaagtcaataggtgtttttatattttattgatttgattctccgagattaattgtagatgatatcattcactacaatttctttaaccctcgctcgaatattatttatccgtcctacccattccatctggtcatgagcctttaattcttctgttattccttctttttcagcaagttcctttaccagctgaaaaaagagattttccgcctgttcattgacatctgcaaggtaactgttcagtttgccacttgtcaataaatccgtgtaaaggattttgcgattctgcttgatataccgcaagtgccgttgtccccaaatgccaatggtttcttccttttgggtgggtaaaacaaggtcaggaagataataatcgccctgcaacgtgtagctgatatctgttttttcatctgtataatgctgtttcatgggtgtactcctcatctctcataattgtgatttctaaagcgcttatcacgctttttagactgctctgcggctcttgcctgctgtaaaagctcgtctacctgtttactgccgatagtcttgcgtaagagcttataatccttcacatcgtcctcaagctgagaattcttctcttgtagagttccgacccggctgcgtaaagtatcacgttcagctgcaagactatggtttgccttttgccacttaccgaactcatttttaagctcaaaatatcgcaccagaacgctctttacaaagcgctttagccgattgattaatggctcaacgaattttgttttgtagctctttgcagacattaacgcagtaggttctggtaactgatactgaggatcagtctcaaaggtttccgtaatttttgtgatagctgtttcacaatcagcaaggttagctatacgcttggaaagctcatcaaccttgtcttttttatcgtttatttccacctccaactgtgcgacctctttggcacgctcctgttttttataatcccaatccgtctggtgcttttcgtgcgtacctttctgttcccattcaatgccgtgacgctccattacagcggcaagctgctgtttttcagaatacacccactgattccattccgtatagccacgggtgccacccttgaagccctgcgctgcaagcgcctgtttgagcgatacacgggtatcaagcccacgcttgctcccggtggtgaacggcacaaagtcgatgtgcagatggggtgtggcttcgtccatgtggagatgtgctgagaaaacacggagatagaggttgcgctcctgaaatcgctgcatatattcgtcaagcaccttttccgcaagccgtccttcctcactttgagcgttcatatccttaaaattcccgatctgcaaaatgacctcatggaatggtttctcttgtttgcccgaacgtatcttttcgtagtaatcagctattacacggtcagtgcgtgtctgtttggcattgaaacgctctaacgcttcatcaaatagctcgtggtaaactgtctttatattttcattacaataatcatggttcaatgaggctcgctctgggtctgtattcttagcatggaacatacggctgttatgattgaccgagcctttcccaaccataacactgatggttcgctgcatagaaccctcctttctttttcggctgataaccggcgcaagccgaaggttctgttactcttgtcaagagtaacgcaaaagcacttttgacactcgcaagccgttggctgctcctatcaaaagctgctgttgcgctctccgagggggtaacagtcatcttttgatgactgcgccagctcacgccgctggctggggcgtcgccccgttgtctgcggacaactccccagcagggctgccctttgaaaaggccaccctgcaccccgcctaaacttaccgtgacggtacgtgtcgatggtgacggtgtttttgataccccctaaactatcgtcacgaccgtcacacatcgtcacgcctgctcaaaataaaagcttacttttcgcccaccatggcttcgactgctctcatatcgaacaccatactcgttgaataaccgccctgcgttgacattcagcttcattgtcaaaacattcggcttaaggtcaactccgagaaaagtggctaattcggttgccgtgcctttccattggggattgttcaccgtaatccgttttgcaatttcctccaacaatggttctgggggttctttccatagttctgtttccgctttctcaagttcccatatcagcctttcgggatgtcgtgtaaggtacagcttttggtcttgctgatctctgcccgacacttcaagggtagcggcattatttgtacgcttttctttctgcaagagaaacgctccgtctgctgcaccgagtagccccgttgtccctgaaatcatatcaaatttatcatctgcttgttgttttcgagtgtggtgtaccaacagcacgcaaataccgtggttatcagcaaactgtttgagccgtgttatgatctcataatcattcgcatagctgtaaccttcaccgcccaattcacggattttttgcagcgtatcgatgatgattaatcttgtatcttggtgcaattttacaaactccgaaagctgcccattaagtccgctgtgaagctgaccagccgaaacagagaagaacaaattgtctgccccctctgtgccaaacatacggtaaagcctttcctgcaagcggcggtaatcatcctcaagggcaagatatagcactgtgccttttcggactggatattcccaaaggggaagtcccacgctgatgtggtaggcgatttgagccatcaagaagcttttgccaagcttcggggcaccaacgaaaagataaacaccggggtagagcaagccgtcaattagcggcggcttgctctgataaacagtgtcgtataactcaatcatggatactgtttcaagagatttgattttttcgtatttttcggatatactgtcattagcacatacaagagatgattgcctttcatctgcgccaacagatgagtaacgggcaatcatttctttttgtctattcattctctttcctccttcatgccgtccatggttacagtaatcaattgaattgtttccagaagcccatcatcaacttgttggccggattcaattcgttgtaattcttccagaactgcggcaagctggttacggagtgctttgaatacacggggattgccaacaaccacaacatcccggcacattaaacgccgtgtgatatagtcctgcttggtaagacctgacaattgcacggccatttcaatctgcttatcctcctctggtgacactcgaaacgctactgtcttgtttctccagcggttgtgattatcaagatttttagctgacatcttccattcctcccctgatactacttaatttttctgccatttccgtttgggttgtagggaaaaggtgtgcgtatttgtaggttatatcaatgctctcgtgccctacacggtcagcaatcgccagcgccgtaaagcccatatcaattagcagcgatacgtgagaatgacgaatatcgtgaattctgattcttttcacacccgttgccttacagccacgctccatttcatgtttgagatagtgtttcgtgataggaaagatacggtcatctggttttgcgccgtatagcatttttagatattcctgcatttcgacgcttagaaactgcggcagtttaatgattctattactcttctttgttttaggcgttgtgactacatctcgacctttcagccgttggtaggatttattgatggatacggtttctttatcaaaatcgaagtctgccgatgtcaacgccagcagttcaccctcacgaatgccgcaccaatacagcatttcaaaggcgtaataagaaatcggcttatccatcatggcatcggaaaacctctgatactcatcctttgtccaaaacagcatttctttgcgttcctccgtccccatattcccggcctttgctgccggattaatccgtaaatcataatagcggactgcatggttaaaaatggcgctcaactgattgtgaattgttttcaggtaggtggaggacaaaaggcggccatttttgtccttttggctgcggatttcattctgccacgcaatcacgtcttttgccgtgatttctgatagcttacgctgcccaaaatagggcaggattttcttttggatgatactttctttagtcagccatgtgttctccttcaggcggggtttgatatccttttcatagagggtgacaaagctctcaaaagtcatatccacgtccgcccgcttttgtcgtaggaactcctgttcccagtcaagcgcttcccgcttggtaggaaaccctcgtttacatttttgttttcgttcccccttccaatcggtgtagcggaacatggtgtaccatgttccattatcttcatttttaaatgctgccatcgttaatccttcctttcatttgggttctttgccccatagaatttctcgtaaaagaatttgcggtcaattcttcctgcaatggtaatacaccctgattttttcagttcttcgtttagctttcggataagcttataagcatacggcgtggaaacatcaagcgcctctgcaacctcacccacacgcataaacattttttcagccattcatcgttcctctctttctaagattcttttgccgttttacccgaaacagattcctgacaggcaaccttgtgtggcgctgtgtcgttctcacttccttggcaggctcgctttctttactgaaaggtcttggcctgcttccccagaaggtagctgttcggacggtcatttggtttttgttaagcttatttgtttagcttagcttattatactaaacatatttgtttgtgtcaaggagcttgcaggaaaataattaaacttttttgcttagtttcgcttgactattcttaaacaaatatgttatactaacttcaacgaagcgctacataggagttgataaagatggcgattggagaaagaattcattttttgcggattctgcgtggtatgacgcagaagtatcttggtatggcggtggggttcccagagagaacggctgatgttcgcatggcgcaatacgaaactggcacaaggacaccgaaagcggatttaactgccgctttagcgcacacgcttgatgtatcgccgcgggcacttaatgttcctgacattgacagcgatattggcctcatgcacacattgtttgcccttgaagatttgcgagggctgaaaatcagtgaggttgacggagaaatctgtctgcggctggacaaaggggcagggcatacctatgatgatatggtcaaaatgcttactgcttggtggcaacaagctgcaaagctggaagccggggaaatcatcaaagaggagtacgaccagtggcggtatagatatcctgagtttgacaccacacatcattgggcgaaagttccgtcacaggaattgagcgatatgcttctaaaggaactggataaataacgaaacggtcttgctgatttttgttcagtaagaccgttttatatggttggagcttacagacacttacaaaccgttcactatccgtaataagtgccaaaaatgctcctgttatcaaattgttatcaaaaggcaaaaaagaatcccggaaacccgcttaaacagcgagtttccggggttttgttacttattcccactctatcgtggcgggcggctttgaggtaatatcataaacaatccggttaatgtggcttacctcgttgataatacggttcgacaccttagcaagcaaatcgtaggggatatgcgcccagtcggccgtcataaagtcgttcgtcgtaacgccgcgcagggcaattgtaaagtcgtaggtgcggccgtcgcccataacgcccacacttttcacgttggtgagcaccgcgaaatattggctgacggtacggtcaagctttgcaagcctgatttcctcacggaaaattgcgtccgcgtcctttaagatttcaagcttttcttccgtaatctcgcccattacgcggatagcaagccccgggccgggaaacggctggcgccataccaggaaatcgggtatccccagctctaagcccgcgcgcctgacctcatccttgaaaaggtcgcgcagcggttccaccaggccggtaaagccgatgtcgtccggcaggccgccgacgttgtggtggcttttgatgaccgccgcttcccctacgccgctttccacgacgtccgggtaaatcgttccctggcagaggtaatcgaccttgcctatttttttggcctcttcctcaaatacgcggataaactcttctccgataattttacgcttgcgctccgggtcggaaacgcccttgagcctgcttaaaaagcggtccttcgcgtcaactcgaacaagattcatatcaaactgcttacggaaaacggtttccacctcgtcgccctcgtttttacgaagcaggccgtggtctacaaaaatgcaggtcagctgcctgccgaccgccttatgcacgagcaacgcggcgactgagctgtccacaccgccagaaagcccgcagagcacttttttatcgccgatttcacgccttaatctctctatcgtctcggtcacgaaggaggacatcttccagtcgcctctgcagccgcagacattataaaggaagttgtgcagcattttgccgccttcctctgtatgcgatacctccggatggaactgcatggcgcaaagtcccttttccttgttctccatagcggcaaccgggcagttcggtgtctttgccgtcacgataaagccttccggcggggattcgatatagtcggtatggctcatccaacagacggaattcggcttgacattttcaaacaacgggctgcaggtatcaaaagtgacagtcgtcttgccgtattccttgacctgcgagctttttacctttccgccgagcatttgcgccatcacctgcgcgccgtagcaaatgccgagcaccggcacgccgcaggaaaacagctcaggggcgcatttcggcgtgtcgtgcgcatatacgctgttggggcctccagtgaaaataacgcccttatacccggcttttacaatatcttttacaggggttttatatgatttgatttcacaatatacgttatgctcgcgaaccctgcgcgcaatcagctgcgcatactgtccgccaaagtccatcacaaggacagattcgtttgttttgctcatagaccttccgccttatttcttcaatttatctgtaaataatattgtccctcgcggcaccgttggatataatcccaatcgggataccgatttctttttccgcgaactcaatatacctgcggcagttttcaggcaaatcctcgtatttcttgatatcgcggatatcgcagttccagccgggaagcacctcaaaaataggctttgcccttttcagttttgtcgtcgatgggaagtaatcgatacgctctccgtcgagctcatacccgacgcataccggaatttcatcgagatagccgagcacgtcaagtacggtaaaagcgattttcgtcgtaccctgcacgcggcagccgtagcgggtggccaccaaatcgagccagcccatccttctcggccttccggtcgtcgcgccgtattcgccgccgtcgccgccgcggcgcctcagctcgtcggcctcttccccgaagatttcgctgacaaattcaccagcgcccactgcgcttgagtatgccttgaccaccgtaatgacttctttgatttcataaggcggaagccccgcgcctaccgcgccgtagcccgcgattgtgttcgaggacgtaaccattgggtaaattccgaagtccgtatccttcagcgcgccgagctgtccttcgagcaggatgttccttccatcctttaccgcgtggtacaggtaatcgaacgtatccgcgacatatggggcaagctgctctttatattccatcagtttattatagatttcttctactgtaatttccggcttatgatacaggtgcctgagcgtcgcgttcttaatttcgagaacacgggctattttttccttcaaaatttcctggtcgtcgtaaagctcgttgacctggaagccgatttttgagaacttgtccgagtaaaacggcgcaatgcccgacttggtagagccaaagcttttgccgcctaaacgttcctcttcataacagtcgaacaggatatggtatggcataacaatctgcgccctgtccgaaacaagaattttaggagcgggtacgccgcgttcttctagcgaagcaatttccctgacgaaattttcgacgctaagcgccacgccgttgccgatgatattggtgatatggctgtggaatacgccggatggaagctggtgcagggcaaatttgccgtaattgtttacgatggtatggcccgcgttgctcccgccctgaaagcggatgacaatatctgactgtccggcaagaacgtctgtaattttgcccttgccctcgtcgccccagtttgcaccgacaatggctttaatcatggaaaaccactcctaaattataaaattcaaacacgcaatcccggggtattttcccatttgcaagccgcaaaaaatgaaaagtcccccagacttttaagaatagcagaataaaacaaattttgcaaggcaaatcagcgatttgccttgcaaaaacagaaaaacttatacgttgatttccgccttttccaggttaaggccctcataaccggaaagggcttccttcacaggcccgtttaaaaattcctccgtctgctgcggcgccctgccgacatagcgttcgggtgtaataatctgctcaagctgcgcaaggctcacgccgaacgccgggtcagccgcaatacgctcaagcaggtcgttttccccgccctcttccttgatgactttggaggccgccatggaatgcacgcgcacgcgctcatggagcacctgcctgtccgcgcctagcttaaccgcgtccatcataatattttcagtcgccataaacggcagctctttcctcaggcgctgttcaatgaccttcgggtaaacgacaaggccgtcggcaacgtttgcatacaggtttaagattccgtcgaccgctaaaaacgcctcggctacgctgatacgcttgttcgcagagtcgtcgagcgtgcgctcgaaccactgggtagaggccgtcatggcgggatttaaagcgtccgccactacataacgcgcaagcgacgcaatgcgctcggagcgcatcgggttgcgcttgtaagccatagcggaggaaccaatctggttcttttcaaacggctcttccacttccttcaaatgctgcagcaggcggatatcgtttgaaaatttcgcggcgctctgcgcaattccgcttaaaacagaaagcatttggtaatcgagctttctcgaataggtttggccggaaacggcaaagcagccgctatagcccattttctctgcaattttcttatccaatgccttgactttcccatggtcgccgtcaaacagctccagaaagcttgcctgcgtgccggtcgtccccttcgagcccaaaagctttgcttttgaaagctggtactctacgtcctccaaatccataagcaagtcctgaatccagagcgctgcgcgcttacccacggttgtgggctgcgccggctggaaatgcgtaaacgctagcgtcggcagatttttatacttgtccgcaaaaacagacagctccttaatgacagacacaagcttattgcgaatgagctttaacgcctccgtcatgatgataacgtcggtgttgtccccaacatagcaggacgtcgctcccagatggataatgccctttgccgccggacattgttcgccgtaggcgtagacatgcgacatcacgtcgtggcgcacaagcttttcgcgttcccgcgcgacctcataattgatatcatccttatgcgcctcaagctcgttgatttgttcctgcgtaatcggcaggccgagctccatctccgcctgcgcaagcgcaatccagagcctgcgccatgtgcggaacttcatatcgggggaaaataggtatttcatctgcttgtccgcatagcgctcggaaagcggggattcgtaaacgtctctcatactgtaaaacacctttcaaagcaggaaaaccgcgccccgaaacggaggtacggccctacctctgtaatttctattacaaataatacatattaataatttcatcataagaatccacttcatttgcctgcgtgaattccccggtaaatggaaccggctacttaaccgccagcaaatagcttctgtctattctgcggcagatttcttcaagcgggacggaatcatcaagaagaatggtataccagtgctttttgttcatgtgatagccgggaaaatatattttgttatcaagcaggggttccaactcttccggttggatacgaaggtctataatttccgccatttcgtcagattcaacgcctaaccttcgctttgatacgttgagaagcaccccataccactttcccgtgtcccgcctgcgccagaccgcattatcaggaaatttttcccataaatactcaagctcatcaccataagcatttcttacataagaaatcagttcttttgcttgttcggacttgaatacatccggctcaaagcattggccggcaatttccaaaagcgtttcttcatattggcctctaaccacacccacgaagctgccaaccgcgccatcagtaagatgcagtgtgtaaggctcgttaaaggaagggtcaatcatctctgatgaaatttcgccctccgctgtgatttgaacagttaatatgaacccgctgccgggaagaattttatcataaacatagcgggaacctttttgctcaaatccgaaaggcgcgagtttggagaggttaacttttttgtttctgaatatactgtgaatcaaatctgccacattgcgcctccaaattcgttttccccgacgcctgccttcttgtccttccgtcgcgaaaccgcagccgcgttcattaagcgtttcaacgttttaaaatacaagttcctgtttttgtaaaatctgatatcaacactttttaaactgcatgccgccgcgttccttgccctcgagcatacgcgttgtggtctgcgcgggatagctgcccgtaaagcacgcgtcacagtagccgcattccttgttgaagagcatctccggcagggattccgcgggcaaaaagccgatggaatccgcaccgcttaatttgccgatttcctctaccgtatggttgcaggcaatcagctcttcctttgaagggatgtcagtaccataatagcacggccacataaagggcggtgaactgatgcgcaggtgcacttccttcgcgcccgcgtccttgagcattttgacaatacggtcgcaggtggtgccgcggacaatgctgtcgtcgagcatgacgacgcgctttccctctaccgacgtgcccagtggattgagctttatacgcacgctcttcatgcgctctttttggcttggcttgataaaggtcctgccgatatagttatttttgacgatacccttttcgtagggaatgccggattcttcgctgtagccgattgccgcgtcaatgcccgattccggcacgccgatgacgaggtccgcctctaccgggtaggtacgggccagaatcctgccggcctgttttctcgcctcgtatacgccgatgccgtcgataacggaatcggtgcgggcaaagtaaatatattcaaatacgcacagcgcttttttgccgccgcagtggtccttgatggaatgaacgcccgtgtcgtccaccacaataatttcacccggctcgacgtcgcgcacaaaatcggcgcccgccgcgtcgagcgcgctcgtctcgcttgcaaaaacaacgctgtcccccgccttacccatacacaacgggcggaacccgtgcgggtcgcgcgcggcgattagctttctcgggctcatgacaatcaatgaatacgcgccgtttatctggtacatggtgcggcgtaccgcttcctcgatagaatggcatttaatacgctcgcgcgcgataatataggcgatgacctcggagtcgatggtcgtctggaaaatcgcgccgcggtgctcaagctcgcgccttatctcaagcgcgtttgtcaggttgccgttgtgcgcaatcgcaagaacgcccttgatatagcgcataacgagcggctgcgaattttcccgcacgctgccgccggctgtagaatagcgcacatggcctaccgccatttgcccctgcatgtcgtcgagcacgccgcctgagaacacctcggtgacaaggcccatatccttatggtagctgatgacgccgcggtcgttgaccgcgatgccgcagctttcctgcccgcggtgctgtaaggcaagcagcccgttatacgccgcgtaagcgggggcaagggcgccgtcgccgtagataccgaagacgccgcattcctcatgcaggccttcatccctgaaatgattcaaagagaaatccaatccgttcacctcaaagcaaaattaaaaaacttacagcccgattctcttcataacctctgcgtatgcttcctcgacgccgcccatatccctgcggaagcggtccttgtcgagcttttcctgcgtatggatatcccaaaagcggcaggtgtcgggtgaaatttcgtccgcaaggacaatgccgcccttgtatctgccgaattcgagcttaaagtcgattaaatcaatgttgacgctcttaaagaactccaccatgatttcattaaccttgagcgccatgtctgcaatggcgtcaacctcttccttcgtcgcaagctccgcggcaaggatgtgatactcgtttacaatcgggtcgcccaggtcgtcgtccttatagcagaactccaatacagtcgttttcatcggcgtaccctcgggaaggccgagcctcttagaaaggctgcctgccgccttatttctgacaatgacctccagcgggacaatttcgacctttttgacgacggtctccctgtcgttaatctcctcgacaaaatgggtcttaatccccttctcctcaagcagcttgaacatgaaattcgacatcctgttatttacgacgcccttgccgacaatcgtaccctttttctggccgttgaatgccgtcgcgtcgtccttataggaaacgatgcaaaggtcagggtcgctcgtttcaaataccttttttgccttgccctcataaatcatcttgcccttttccactggaaagtcctcctttgagttatgaataaaatgtttctgataaaaccaaaacttattataaaccaatcaccctgcaatcgcaacaggttaaatctactttttctgtttttatcttcatttaatagacaatttttgaagttagctaaaatgtcggttcaaatacaggtattttttggacgctattttttgcaggattttaaaaaaatcttgcaaaaacattttttttatgctatgatgaagcacgtcagcaacgaggctgttttacaggatgcgtccgggcagccagcctgccggggcgcattttatgttccatcaattaaaggaggttttttcccatgtcctatgtaagcgaacagttagaaagattaaaggcaaagaaccctgctgagccggaattcatccaggccgcaactgaggttctgacttccctcgaacccgtatttgagcagaaccccaaataccagcaggaaagtatattagaaagaattacagaacccgaaagggttattatgttccgcgtgccctgggtagacgacaacggcaaggtacaggtcaaccgcggctaccgcgtacagttcaacagcgcaatcggcccgtataagggcggcctgaggcttcatccgtccgtcaatctcggcgtaatcaagttcttaggttttgagcagatttttaaaaacgcactgaccggcctgcccataggcggaggcaagggcggagccgattttgacccgaagggcaagagcgaccgcgaggtcatggccttctgccagagctttatgacggagctctgccgccatatcggcgcggacaccgacgttcccgcgggcgatatcggcacgggcgcgcgtgaaattggttatatgtttggccagtacaaaaaaatcaagaacgtatacgagggcgtcctgaccggcaaaggcctcaattatggcggctcgcttgcgagaaccgaagccaccggctacggcctgctctacctcaccgccgaaatgctcaagcagaacggtaaggacatcaagggcaagaccgtctgcgtatccggcgcgggcaacgttgcgatttacgcgacgcagaaggcatttgagctcggcgcaaaggttgtcaccatgtctgattccaccggctggatttacgacgagcagggtatcgaccttgccgcggtcaaagagattaaggaggtcaagcgcgcgcgcctgaccgagtataagaactatcgtccggcttcccagtaccacgagggcaggttcgactggtctgttccctgtgatatcgcgctcccctgcgcgacacagaacgagcttgataaagaaagcgctgaaaggcttgtcaagaacggcgtatttgccgtagcggagggcgcgaacatgccttccacattagaggcaaccaatgtgttcctcgacaacaaaatcctttttgcgcccggcaaggcggcaaacgctggcggcgttgcgacctccgcgcttgagatgacgcagaactccatgcgcctttcctggacgtttgaagaagtcgacagcaagctgcagggcatcatggtcaacattttcagccagatggctgcggccgcaaagaaatacggctttgagggcaactatgtcgtcggcgcgaacatcgccggctttgaaaaggttgccgacgcaatgattgcgcagggcgttatttaagtcgatactttcttattttctaaagcaggccccgcgggaattcccgcggggcctgcttttttcattttaatagcactccgtcggaaaagtaaggcaaatccgggcttttttcataaaataaagaatggaacacttttcgcgggaggtgaaaccatgaacgcttccaaagaccgcaaatgcaaaagcattgaagatttgccggaggaaatcaaacagcagctgtgtttgctcgacaattcccagcagcttatggcgcgtatttttatcgggctgctcctgcaataccatgcgctcgatgtagaccgtgtacagctgctcaacagcgtacagcctgaaggctgctgtgaaaccggcggatgcccggacaccctgacgatgcgcctcggctcctcgttgataattttaagctcccttttgggctttcaggaccagatagagcagacaaacgcgcagacacgctgttcaggcgaatgccccgacgaaacggacgcgcagctcgggctgattgtcattatgattgccgtcatccgttatttccgcctgctcgatacgggcagcgctgctgaaaacggtacggacagccaaattgagcttgaagaagaggacgaggcggccgctatcgtataggcgccaaaaacaggctgagaaaaacatccgctgttttcagcggatgctttgtttcgccataaattaaattacattgatgtcgatgctgatgccgccgtcgcgctgatgtttcctgttgtcgccgccgtaaccgaccgcatatcccataccgaccgttttgttgccgggctcggtaaatttaacggtgtaaacaacagtcttttcatccggctttttcgtatcaattagctgaaaccctgaagctgcacagctaaaataatcccatattccgggtaccttttcaaagtccactgtaatgtcaaattcttgatttacccgcactgtttcgggcgcctccattgacttgaatctgcttttctcaatttccaaagacggagtggaccatttcccataataccgaacattttctccgccctttgcctgaataccgggctcgttccgcgccggatactggtgcacgccgtcggtaaagataatcctggcattttcgatttctttgatatcgtacacatattcatccgtgtaataattattcatggaaatgccgggccaagagtacatttccacttcgtcggcgtcgtctgagtaataataaacgcggatgtcggttccccagtcgctggggcgttcaaaatagaccggaatgtacttctgggaacgctccaggacatggttatccttaaccgtgaccataccgctgacttgtaaatccgctgtctggttgccgctgccgtcgttgacgacaatgctgcagctgctcaaattgctgtttttgtaacggtaccagccgtttccctcatctgtcatggaaacgccgggccaattggtatcgtatgaacccgcattccacaggtggattttaatatttccactccagcccgccggctttgaaaacaggatatcgaccccgcttccggttacagctgaagcgggaactaggaacatagccgcaagaagcacggcagctaataaagtacagattgtttttttgattttcctcttcatcctaaattgatactccttaacaatttttatggaaaatgcgtgcactcataatcccattattagaataccataaatgattaaaaacgcatgtcattttttgtcatacaattgtatattatacattatatataaaaacgcctcaccggaagaaaaacttcttccggtgaggtactgtataaaggagcgttacgggcagttttatttatgcaatttttgcaagcttattctggattttcaaaacgtcagtcatgttgataaatccattcgcgtcgtagtctgcaaattttctgtccgctgacgagagctccgccgccagcgcaaggtacttctggatttccagcacatctgatagcgcaagctctccgtcgcgcgtaacgtcgccgtagctcgcgaggctttcctcagcgctgtaaattgaagtataatccttacggtaaagctgtgcgagctcatcgtacatttttgaaacgagccttggattaaaattagagatactaaatccgcagccgctgagattcatctttgcaatttccagcccttccgggctcgtgccgcgctctgaaaagccttccgatgcggaacccgtcccgttcaagtcgattgcgcagcccgtttccgggtcaaatcctgttctgccggtctccggattgtggtactttgtaataatcaggctggtgcttgcaaacaaaccgccgctccaagagcctgtacgctcgtcataagtgccgtcggggccgagcaggttgcaggtaattgccgccataccgtcacggtccgtataggagccgatgcgcgtttccctgtaccaggggtttcctgtcgttgcggtgggatggatgaacagcgtgcagcccattgccgcgtaataccgtccaagctccgggtagaaatgcccgtcgcggcagatgtcgatgccagccctgccccaccttgtttcaaacatataaggtgtgtctcccgggacggaccacttggactccgagcctgcgcggtgcatcttctggtacgcatcaatcttaccgtcgggatacagcaccgccgccgaattgtagaccttttccacaccttcgtcgtagataggttcatctgtcttctgcgtcatgccaaagataatgtacatgccgtactgctttgcgtattccgaaagcaggctggttgtgggaccgggcaccgtttccgcaagcgcggcctgcatggcttttccggtctcctggtaaaatgggtctgtatcgggcgttttccattcataaccggtcaggaccgtctccgggaaaaccaggatgtcgacgcccttctccccggcttctttaatatacgcagtcatattatcgatatttttctgcttgtcgccccaaacgcccggcatattgacgaccgccgccaccggaccgtctgtaacactgcccgaatagcgaagcggttcgcccgccgcctgtttatccgcaagctccttgtaccactttgcatacatttcgggggcaaagtcgctgttgcggcaggtggagccggtcgaagcttgcagctctacgctgttggtcaccaggccaggaacggctgtgatgatgttcgcgttctggccgggctccccgtctgccgcctcagctccggcataataaacggggccggagcccgccgccccgataataacgctgccgcctgggaagttataggtatatttaccgtcttgtaatcgggggccatcgccgtttacgagatttgcgctcaggacggtatagccttcacgggaggcaatgctttccagccggtttttataataccaaatccatccctggtcatcctcgataccgtcgccgtctatatcggtaaagctgcgtgaggttgctgtcggattcaggagcaggttacagccctttgccgcgtaataccggccgatttcaggcatggcgtaggtatcgtagcagatgctcagtccgatttttccgtactcgcccgcatcgatgagaaccgggttttccccggggatacaccacgagccctccaccggcgtgattttctgataggaggtcgccctgccttccggtgaacaggcaaacgccgagttataggcgtgctccttatctcccgggacgacctccgtcgccccgtatacaatccacataccatactgctttgaaagcgcagagaaggttttcgcagtggggccgtttacggtttccgcctggtttaccgccattttgtagatttccgaatcagtattgctcgacgaagcataaccggtcacgcacatttcagggaacagcaggattttcaccccttttttatacgcctgttcgacgtattgcttcatgctttccacattggcccgcttatcgccccataccgtttgaaaattcaccacgccgagctcgtttggcgtaaacgtatggcttacgcgcggctggggcagccgctcctcccggctgtagccggcggcataggtgcaaacaattgcacccgccgccagaattacagccaaaaacacggcaagcgagcctttgaatacgcttctctttgtcatagcgaccatccactttcctaaaaatttataaagaaaaagggaaacaagcgcagtctgctcttatgcaaacgccattgtttcccatctcttactataaaattttcctcgccccaacgcaagattttaaaataaaaattgcaaatcaaagcattggttgttttttctttgttgttattatattcctgtttgcagagaaaagtcaacgactttctcaggtttttcccacattctatttataatggaataacgttccataatggtgaaaaaatttttacacttcccacaaatgaatataccaaatataattcctgcattttctccaaaattgcaaagggcataaaataccatcggccggttcggtcaacaaaagatgggacagcctatagaaagcgaacggctgtcctccccaccgcaaggcggcagaaacaattttttcgtaggtatacaaaacgcgtcccgttttcaggacatgtattttatatatcaaacggcgtgtacaccttatccgcgccagcaattcccagctccaacagcttctctttcataacggcaaaacaatttttaaataaggtatcggcggatgccgccagacggatgccgtccccctcttccaggctttcgcaaatattccgcgaaatttccggccagccggggaaccgtccatattcgccgccacggatttgcagtatgctgccaaagagcagcagcagggtaattttactgtaaatttctcgaattgccgccagtgggcaatgacgggccgccgcctggagcaacgcgccgacagtggcattgacggctgcatactgcacctttattccagccgcgcgggagattgcgccgagcgattccgcggggcaatgcggaaaagtgtacgcaagtacaggttttccggtaatcgcaagcaattggagcgcttccaaaaaacagatgaatttgttattgctcatcaggcttttcattttatatggcgtagactcatcccccgcgcttaccacacgggttcctacgccgttgcgcgtttctgaaacgcccaattgattcatcagcccgacggtccggcggattgtcatttcagagacatggtaaatgtccgccaaaaccgcgttgcttggaaacagcgtcccgacaggatgaattccctggccgattttgcgcagcaggtcgactgcgatgacgtcgcagtacctgttccttcccttattcggttcccacaaaaagcttgtttgcctcttttctctgcattttttctttgcaggttcaaaatatcgccctgttttttcaaaaaaggcgtcctgcatctcattcagcctgttccttccttctttcaagcgccgttccctgcaatcccgcatgctttgaagaaaggaatccgaaaactgtgataaaagaagctccgctccattttcaccgtatagtttatttaatatgtccagaaacgcgctttcagtaaaggcgccgatatcatagtaaaggttcagcgcggaccggctgcccaaggcgcacagcgcctgtacaaataaccggtaaagacgtttcccgggatgagcgcagccgtatatctccatgaattgcttttcgttcccgccgtttcccgccgcgcaaagcccctgaaaacaaatcggggatgaaatcagcttcagagaacggttcaggtcatcaagcgcttctatacggctgaaaaaaattgtgctgttcaaataatcatcatagggttttcttaggacggaggtctcctttcccctgcaaagccgaataaggccgtcgttttcaagcaacttgagggcccgctgtgccgggcagtaggatatctggtaacggcgggctatttcctgggcggacggaaaacgttctccatcctcatagaagcccagctgtatctggctggcgaggctgcggtaaaccgtctgttcctggctgttggtatatatcatagttttccctcccaccccgtaacgcccattatacgctctccaaacaaagaatgccagagcggcgtgattcgcggcctgtcatcaaagcatggaaacgatgcaaaaaagaggctcccggatgaattttccgggggcctcttttatgagcttcactgtgttatttgcccatccatttctgcagggtgtccattaagaaatgaatatcaatcggttttgcgatatggtcgttcatcccgacgttgcgcgcctttcccacatcggcggcgaaggcgttggctgtcagcgcaataatcggtaccgtctttgcgtcgtcccggtccagcccgcggattttcagcgttgcttcatagccgtccattacaggcatctgtatatccatcaaaaccgcgctgtattcccctatggcggaatccgccagcaattccacggcacgctgcccattctccgcggtatccacgataatattctgcatctggagcagctctataattatttcacggtttaattcgttgtcctctgccagcaggatgtgttttccagacaggtccagccgcttttccggagccggtatatgttcagcctgcgccgcgttttcatcacagaacatctgaagcacatgaagcattttggacttgaagagcggctttgtaataaaggcgtcggcgccggcaagtaaaaaatcatcttcaatatcggaataatcataagctgatattacaataatgggaacgtttccgcccaatttcttccggatagccttgacggtttccattccatccatctccggcattttccaatcgagtattaccgcgaagaaatcgtcctgccgctcatgtgccgccgcaatcaggctgaccgcttccctgcctgacagtacccagtagccgcgcatccccaattcatctaaaagggctgtggcgttttcacatgtaatttgatcatcgtctaccaccaggacgggcagccctgccagctccccgctgcacgcttcttctttttcgcacagctcaagggggaccgatagcgtaaattcactgccttctcccagcctgctctgaacgttgatggtcccgttcatcatatggacaatattttctgtaatcgccatgccaagccccgttccctgcgttttactgatacgcgggtcctcggcacgtgaaaacggctcgaaaattttcggcataaattcactggaaatcccaatcccgttgtcagcgcaaatgaattcatactggccttttcctggaatcggcgaatacaactcgttaattctaagggaaattatcccgccttggggcgtgtatttaatagcgttcgagagaatattcattaaagcctgctgaaggcggcctccatcggcaattacattttcatgcaggacttttccaatacttatctgaaactgctgctgtttttccgtaatcaacggacggcacatattcattacgccttcaaccagcttcgcaaggtttaccgggctgagcgaaaggtctattttgccgctttcaattttggacatatcgagcacttcgttaatcaggctgagtaaatgacggctcgatacattgattttattcaggcagtcgtttattttttcaggcgagcccaggtttgcctgcgcaatggcagtcatacccataatggcgttcataggcgttcggatgtcatgtgacatggaggatagaaaattggttttagcagagcttgcgacccgcgcggactggtaagcgtcttccagcgccctgcgctggcgttcctgctccatccggtccttcgttacatccaggccgacgctgtaaaaggaagggataccgtcccagctgttttccccgctgacatagctgaatgtcatcgtcagaatttttgtttctccgctgcgtgtaacgacgcgcgcttccgcaaccgtgtccactcctgtttttttagagtttttcatgataccgattgtacgctccatgtcctccgggtgaacataagcgcaggtggtattcagttccttttcaaactgctcctttgtatagcctatcaactgcaaaaatccgccgccataccagaggaccgtgttcatatcgcgggcgtctatccgcacaaaccctccgggaatcgtcctgaggattgcttcccgttcccggtcctttttttccagtttatactccaggctgtaattatcatgcgacagctccagacgcgccctgtgcccttcccagtcaatcacgcggtttttaataataaaggtacgtttgagaaccggattgtaaaattcccattcataaaattcatcctcggtcaagcgcgcgttggtacagaacgggcagggtgaattacgcccctgaattacctcatagcatttacgtcccagcgttttttgaagaggaaggcccagggtatcgcaggaagcctggttgaggtaaagcagctcatacgtatccaagtcggctatatagacgttgcccacatattcgtcgagcatccatttaaaataacctgcttttttctctaaacagtcccgttgagaaaaagaatggccggcctgtttttcatcgacagggccttctgccgcctttactattccagttttttgttctggcagcgcggtatcatgttgctccatagccattctcctcgactgtaaattacgggcaaatcagacataaaatagcaattttaaccttgttcacattatatctgacgtcatttgcaaagtcaacttattctttcatcgcccgcttatcatacaaacgataagaagccttattcccatttgaaacatttaagagatacagagatacaaataatggcgataacagacataacagccagcggaaccagcacgttatcgaccggcaatcccaggaaagctgatttcagcaattttattccctgtgtcagcggtaaaatatccgcaattttttgaagcgctgtgggcataacctcataaggaagcgtcgctccggaaaatatcagcatagggaaatataaaatgcttgcgataacccctgctattttcgtattgggcgctacaccacctaccatcataccaatactgaacatggaaacgattatcaaaaggtagccgccgaaaaaggctgcaagcgaaccgcggaattggcagccaaaaaaaatggcagccgcaaagtacaaaagcaggagagaagcaaccgcataaatggtgtatatcgttacctgcacaaataatatcaaagaggggcgaacgggcgtgactttataacgcttcaatatgcctttgccgcggtagtctgatacgaccagcggcaatcccataacgccgcccgcgcaaatggaaattgcagcaagcgcgccgaaggattgttccaaaaaggtgtgctccgcgccctcataggcgggtttatccccgtataggataccgagaattactaaaacaaccatcggaacacaaattgcgaatatgaacatatccatgccccgcagcgacattttcagttccgttttcagcattgctctaaaagttttcatcggcctgtccctcctcgtccgtataccaaagataagcgtcctcgaatttgtcacaagggctgtcctcgattgcttcgtgaactgtgccttgaaacacaattttcccctttttcaaaatacaaatctggtcgcatagggcttctacttcgtccatgaagtgagaggtcaaaaagatagtcagccccttttcctttagtcgggaaaggattttccaaacttcccgacgcgcttttgcgtcaagcccggttgtcagctcatccagaaaaacgactgtcgggtcaggaatgagcgcaaggacgataaacagccgctgcctttgtccgccggataaatccttgacaaggtttttttgcctgtcggcaattccaaaacttttcaataacccatggaaatcagcgggagcacgatagagcgacgcggtgacttcacaaagctccgccacggtgatttggtcttgatagtttgtttcctggaactggacgcctaccttttcaaacagtcttttgcggtcggtgagcgggttcatccccagaacaagcgcttgcccgcaatccgctttttttgttcctaaaatacactcaatcgtcgtactttttcccgcgccattggctccgagaagcccgaaaaccgtgccgcttgttaccgataaactgatgttgtctgctgcaagcagcttgccatatgattttgtaagctgctccactctgattgcttcctgcatagatttgcctccttgttttgatacaaaaagaataccaccaatggaaacattggtggttaaatggagggtttatgaaaatgtaatcttcatttttttcagcatatgaattatctgtttggcattatcttctgcctccgataaagaggtaatgagcctatcgcataccgcaataattgtttcatcttcttttggcgtattcaacgccgcctttatatcaacatttgggttttgcgacagctgggaaagcagccctaaaatcgcctccaagctgtaatttgcacaccgcaaggaacggataactttcaaccgccgaatatctttgtcggtatacacacgatatccgttttgttttcgtttaacggttagtaaaccattcatttcccaatttcgcagggtgtccattgaaacgcccaaatattccgacatctcttttcttttgaaaagatgtatattctcctgtgaagccccggacagaattttctttacaatttcaatcgcttcctctgcgttggtacgttcttgccgaacttgagctaactattcttgcgcaagcgcaagagctgtgtcaaaattgcctgctgccgagcttttcaccatttgaacagctttcttgcgcaggccattttgcagcacttcaacgcgaaaggcaagacgggcaagcctgaattgctcgatatgaaaatccgtaaatacacgatagccgttgggcctgcgttccggttttggtataagctccagctcctcatataaccgaaccgtattcgggtgaatcccgattgcggcggctatttcagcggttttgtatgtattcattaattaccgcctccctgttagagcaattttatcaaaggtcgaaagtatggtgtaatagtggagggttttattatagcaaagactgccgcggcactcaatggcaatagctggggcaggaaggcgccgccgcttttaggcagcggcggcgcggttcattctcccgtacaatggggcaattttgtcgattctcatgtccgcgttttcctgaaatgaaatatgctctaagcttcttcaataaccatgagaaaaaacatgattgagaagttgtttagagcagataacacctaacaccggaaatccgcactgatattactcctgcctctccccggacgccaatcgcgtattcgctcctattttatatacaggagctaaaaacctgggcagctttcgcatagcattcgcctaaatatgcaatccgcttggaaagctctctccgaaagcttttgttcaataacgcttttctgtccgcctcaaaaaagtacccgccttggaggtcgataactttttgaagggcatcccctactatctgatatgcttccctaaagcgcacaatcatcggtgaaatatccgggcacagttcataagcgcggtttagatattcctggatgtaatgcaggtttgttccaatctggacaatacagctcatatatgtgtcaagcggagccgccagcttgctttcatcctgaaaacacacgtcgtcaagcagtgaatccgcccatgcgtcgaacgcttgttttccaaaaacaatccgctgggaatataagccttgggtttcaggtaaattggcaagctttgagctgtttttcagcgcgccgcggatgccgtcagcaatgctggccgtatattttttatgaccaataaacaccaatccatctgatttctctaaaccgtttcgtttttgaaagtaattttccgccatgcattcttcatgcgggccgtcgctttcagggtgtggttcatcggtaaattgcgaccagccaatcaaaacctcgccgttttcgtcatatccaaaaattatagagcatattgggggaccgacgattccaaaggttaataccggcacgccgttgtctatggactgcgttattttacggatatactttgatttgtttttttgcagctcagcctttggcacatattcataatcatagccgcaggccgtgaacgcattgtgaaccggacagattgtatggtggcaggcccctgaataggaatcattatactgccatttgggatttatccacagctgtgtaaacaaatcgcccgctgctcccgcaaaaaacaaaaaatcaaaatttttatcctctcccagcgcattcattacagaacgcatgcagctgggaaacataaaattctctgtcttgttttcgtagattctttctacgccaggtattattctgcgagtcaaaacataacctcccttaatacttatattgattgtaagcggcgcgaacatttttaaattgccggagtggttctttgcctcggatggcgttacgccatggaaccgtacaaacgcttttgaaaagctttcgggtgtttcgtagccatactttaacgcgatatgcaaaacagattcatttgactgtaacagctcatccgccgcaagcgtcagccgccggttccgtacgtattccccgaccgaatggcctgttataatatgaaaagccttttgaaggctgcttgcagatgaaaagacgtgctccgcaatcatattgacagacagttcgttcattaaattttcttcaatgaagttgattgatttctgtacttcttcaatccagtccatttcgtatcacctcttttcgaattatagcagaaagtgttttcttatttcctgtctttttcaattttaatttgtccaatttgcggcttataaacgaaagaagccggccgctttgcggcaatcggcttctttcggcaatattttcgggataccttataaaaaagatttctgctaagccctgaatcaaaatctcaaaccacaatagttttatagtaagcaaagccggcgcaggtgcgtttaccggcaggttactcagccggtacgccgcctgcccagcggttcaccagcttactgcaggcagtaatggttggggccataatcgggcctaccgccagcatgcctaaaattgttcccacaaacacgacgccacccatcaggaaaccgcccaacaccataacgccgtcaaatataatccgttcccacctgaggggaatttttgttttggcggaaatcgtctggtttaaagcgtctgaggggccaatgccaaattcagcggattggtaaagccccaaaccgataccgatgcctaaggttccggctataatcaccacgatacgaatagcaaggccaggcgaagttcccattccctggttcagcagggaaataaacatatcgctgaaaaagcccaaagaaaatgtataaagtatcgttccaatattgattagctttcggttgaatatcagaataagcaggaaacaggccgcgttaaacacattcatggccattccaaagctcaggtgaaacacgttgcccaggccctgtacaaaggctgtcaccgggtcactgcctaaatttgctgtaacataacaagcagcgccaaatccgcaaatcacgactccaatcataatgaccaggcaccgtacaacaatactgcgtaaggtatattttccttttcccatagggcaacttcctttgctgtgttctgccccagtatatcggtgatgaaccgccaagaagcatcaccgatatatacgggagccttttgtaaattactttttttccagtatggcgtcaacgaagccgtcgataaaccgccgcccgtccagatatgtggcaatacggcagtttggctctttcccctggccggttttaagaatctgccggccgaaataagcgactgtctgcccgcgggaaagtgttccctccagctcaatgtcgatgtatacaggcgctgaatatttacacaggtcttcatccactgtcaaggccagcgctatggcgtcatccatcgggaatccgcctaattgaaaatattcccgccagatgtcgatataaatagggaacttatcagcaataaattccaccgctttattcgagccctggtttacaaggtccgcaatgtggtctcgcgtgaacataccgcaggcaaagcggttgtcttcgcaaatatcgagaggcacacaggttatagccataccggaattaaatacaattttcgcggcctccgggtcggcccagatattgtattccgtaacaggggttatgttacccggcgtttggaagcacccgcccataatatacgcgtgctttatcttccgggcaatgccggaatccttccgcagcgccagggcgatattggtcagcgggccagtaaccactaaagcaatttcaccgggccgctcgttaaacgcctgcgccaggtaatcgctggcggccatgctttccggcattttcacaggccgctgcgccggagaattgaatttgtccagccggtctccaaacttccaccggagctcgtcgtcaaaatggacaggggactccaggtcttcggcagcctgcgggttaagcggcccctgcgcgccgctgtaaacaggaatttccgtatgcccggcaatttccaaggtgttgagggcaacccaggaggcctgctcgatgctgccgctggctccacaggaggtcgttacggcaagcaaatttattctgctgtgaaaagccccgtaaagaaccgccagaatatcatcaccggctgagtcaatatctaaaataacgtcgaccattaaaaaacctccctttacttctgctctctcagctgcataaactctacccggatgccatccgggtcaatcagctgaacccacggtgcaaattcatgctcgataacggggctcacaaacgctactccctgagccttgagcgtatcgacgaaccggtagatatcctctaccaaaagcgctatgtgggctgcgccgatttggttagccaggaccggagcctgcggcccctgcccctccttatattggataaattccagcatgcatccataaccgaccaattgtataggctcaatggcgcagccgggaaagcccatgccttccgcgcattcttccggtgtttctacccaccggtcaaaaaactgaaagccgagcttttcataaaacgccttggatacgtccacatccttcacggtaaagccaatatgatgcagggactgaatccccaaaccttccgacatatacaatctctcctttccgcccaaaagggccttttccgctaatcctttggaacgacagacggaacgtaggactccagattttccctttcacccctgcgttttttccgaatgccataaaccactagcgctaagatggtagccgcgtaaggaagcatggacaaaatttggacaggcatattttctgattgaagccggatggcagcgccttccgccgtgccaaaaatcatggcggcaattgcggtgcctccaatacgtccgtttccgaaaattgtagccgccaatgcgataaacccgcggtctgaagtcatgttgtggctgtagaggcctaacgtggaaattgaaagaaacgcgccgccaatgcccgcggtaaagccgcttatcatcagcgtggagatttttaccttcagggcggaaatgccggcagcctttgccgcggcctcattttctcctaccgcgcggacccatgacccatatttggttttttccattacatagcgcaatacgaataccaagacaatggttataaaaaacaatacgctttgcccattgagcgcagggccgattaccgggatgttttcaaggaatggaatatccaccaccggcagggtaggcatccccttgggcttataggtgcccggttcattgaaccagacggtcatcagcagcaaagtcagccctgaagcaaacaggttcagtccaataccgccgattatcttatcgcaccccaaataaaaaatcatcagggcgaacaggaacgaaaccaaaagagaacaggcaatcccgcccagcaggccaatccaggcgctttgtgcctggaacccgattaccatggaaaagaaggcggatatcagcatcataccttccatgccaatattggtcgtccgggatttttccgcaaaggctccgccgatggccgtgactaagataggagtcatcgtgcttaaggcagtagctaaaaagagttccagttccctcatacggccgtccccccttttcgttgtttcttgagcctcaacgctttaggccatttcaggttctggctggttaccagcataacgacaataccctggataaggaagaccaaagcaaagggaacgtctgtactcatttgcatggtggtggcaccgttcatcagcgttccatagaaaacagccgatattaacaccccgattggatgcaggccgccgataagggcaactgtgatgcccagcatgccatagcctggagaaaagcctgaaataaagcggtattcaatgcccatggtaactaaagcgcccgccaggccggcaaacgcgccgcttgaaagcatcgaatagaaaagcaccttcttgtcatggattccttccgtctgtgaaaacaatgggttcattccgaccatgcgcaccttcagtccgcccttcgtacggtagaagaagaaatagacagccgcaatcaggagcagcgcaatgataatgcctacgttgattttagtggagggaatgagctggggaagacggagcgagcgatccagccgcaccgtttccggcgcgcctgaattgggatttcgcagcgccccgtttacaagatacgccgtcaggaagatggcaatattggacgacatgagggttgtaacgatttcattgattcccaatgaaatttttagtattgcgggaataagcacccacagagcgcctgccaatgcgccgcccaacaaggccagggtaatcgtgagaaatggaggcaggggactaaaaatggcaattacggcagaaaccatagcgcccaaatacagctggccttctccgcccatgttaaatgctccggccttaaagccaatcatagaagcaaggcctgtcacaatcaagattgtcgcgattgagatcatattgccaaaattataaatatctgtgaaagaactaagcacaaaggaggaaaacgccgttaacggttcttttgaaataagcgctatggctaaaatcgccacgataaagctcagaatcacagcgcttatctggcgggaagagcttttccataagtgtgatatagatttaaacaacttttctttcatcttgaacacctaacatatatggtccgatggtccgttcatcaggcagtgctccgctgaattccttcatcagcatgccgtcatataataccatcactcggtcggataattccaaaatttctccaagctccattgagattaaaagaattgccacgccctcgtcccgcagcttgttcaactggttatgtacaaactcgatagcgcctatatccagtccgcgggtcggctctgccgctactacaattttggggctgcgggacagctcccgggctagaaccaccttttggatattaccgccggacaaacggcggataatcgtgttgggataagcgtcgcgtacatcatactgtgcgattaattcttttgttcgtgcaattacctttttacggtttaaaacaaatttgccaagggacgggtcgtccagaagccctgcggccacattatccgtaatattggaatagcggctggttccgcgggtcattcggtcttccggaatcagcacgaccccgtttttacgaaaaacggatacaggctgcccggtcaaattctttccgtcaatcagcacctgtccattatggggcttttgaatgcctgtaaccagattaatcagctcggactgtccgtttccagccacgcccgcaatgcccaggatttctcccgcccgcagctgaaagctgaaatctttcagcatattgacgccatggatatcaaaagcgctcaagcttttgccttccagcattacgccgcccattttatggacagttttctctttgggcggcgttggttcttttccaatcattaaagtggccagctcatgctgcgtaaaggttccccgctcatgggtggaaatctttttaccccgccttataatgacgacccggtcggcaatttgctctacttcgttgaggcggtgggttataaggattatggacataccgtcgtcggtcaaacgtttgagtacttcaaaaagcttgtcaacttcactggcggtaagcactgccgtaggctcatccaaaataaggattttcacttcttttgacagcgcccgcagtatttctactctctggcgcagccccacggacaggttggacacacggtcggtgggattgatttgcagcccgtaccgctgtgaaagctgcgaaacgatttcgttttgctttttttcattgacccggttcattttttctgtttcttcgtggcccaagaacacgttttccgctacggtgaaggaaggcaccaacttaaaatgctgatgtaccataccaatgccgtaatccagcgcgtgacgtggattttccagcttgaccggctgcccttcaatgataatttccccttcttccgggattagcagcccaaaaaggcagttcatcaatgtggattttccggcgccattttcgccgcagattgcaagcacctcgccgcgctttaagtccaggtcgatatggtccaccgcgaccttatcgccaaaacgttttactattcctttgaattcagccacgggctgccccgccggattttgattcatcgtattcatcttcgtatccatcataaattaattatcataatagcttgcaggcttaatctccccagaggtaattttcgccttaatttcttcaatctggctgcgaatattttctggaaccatttcttcgtccatttccaggtccattcctttattgcttacatcgcctacaatggttttgcccagttcaagcttgccttctttcgcctgggaaatcgcatcaaatacagtctggtcaaccgccttgataacactggcgggaataaagccttcgtgcaggtggttctggttgctgtcgcttcccattccataacgcttcgcctctgccgccgctttcaaaacaccgagtccggcggggcctgcgcactggtataccacgtcggcgccgtcattgattgcagccatggccgtatcgtaacccttttgagggtcggtaaagcttcccgcaaaacgggagtcaaccgtaatcttggaatcaatatatttggcgccggcttcaaagcccgcaataaaatcgcggccgacagggatatcttccccgcctacaatagcgacccggttactgcctgtggcattagggaacagatctgcgtttttcgtaatcaaagcagccagcgcgcctgccagaaaagcgccttcgttttgcttatagacgataccggtaacgttgtcgccgtttgattcggcatcaaaaataataaatggcttgttcgggaagtcaggggcaatttcttccaatgtggtggctaccacggtaccgccggttacaatcaggtccacgctttcgttctgcgccgcttcgcgcagattgcggtcccaggcctgcgggtcgtctgtagaagcagggataaccctgacttcacagcctaaccggtcgcgcgcccactctaagccgcggttagcggaatccataaagctttcgtcgcctagctcgccggaaagcggggcgtaaacaacaaatttatcgtcgccgccggagcttgccccaccggacgaagtgtcgccggaggatgtggctggagtctcgccgcagcccacaaacagaaaagtgcataataacaccgacaggattaaactgagaattcgatacgactttttcatgtgtcatccatttcctttcttcaatcaaacatatttgttgtattgtcataagcgccagccggtcagcggacagaagcccggcgcttctcttcccacattttctgaaaagccgtcacctccttcatggtaggaatggacgcggacgctccttttcgggaaaccgcgatagaggaagcgatagacgcgttttccaaaattttttctaatggctccccctggaacaatcccgctacgtagtaaccgcaaaaggtatcgcccgccgcggttgtatcaacgaccggaacgttgtagattccgtggcggatgctttggcggctgtcccgataaatcgccccgtctctccccactgtcagtaccaacgttgcgcctggatattggctatgtaaagaggacaaaatttcttcataatctgtttttccggtaagcgccttcccttccagttcattaagaataaaacagtccaccaaatgaagcgggtaatcaagcagctcctgcgttacaggagaggggttaaacacaacccggatacccttttcatgcgccctttgaatggcatagccaacattgcttatctcgttttggagcaatagcaaatcgccttggtcaaaccgcgcaagcgtctgctctatataagcctgctctatagcgccgtttgcgcctgcataaacgataatgctgttctgccccttacggtccacctggataattgcatggccgctgggaaaatccagccgctgcaaataatccacatgaacgttttcccgctccagcagggcgattaaatctgctccatcctctcccaccgccccggcatggtaaacggggattccggcccgggctatggcaatggattgattgaagccctttcctcccagaaaaatttcaaatttttgagcggaaatagtttcgcccgcgcttacaaattcttctacattataaacgcggtcaacattcagagaacccaaacttaatatcttcacaatatccctcttttcctgacgggtgaagctgtactttcccgtatgataagttccggtttaaatacataattatgcttttccgggcctgtccccttttgtatcgactttaacagcgtttctactacgcattcacccatttggcggatgggctggcggacggtcgtcaaagaaggctggattatctcgctgaaaaaggtatcgtcgaagccaactacggaaagctctttcggaatcgataaattagcttggcgggcttcgcggtaaatcccatatgccatgatatcgttgaaggcgaaaatagcggtcgctcccttattcagaaaataggccaaagccgactgctcgcatcctatttggtaggttccctcataaacaagcgaatcatcaaaggggatgttatgctcggcaaaagcaaatttacagccgctgaggcgctcttgtgaggaattcaggctgtgagggccggtatagcagccaatgcgcgtatgccccaattgaagcaggtggcgggccgcgagatatcccccctgaaagtggtctagtacaatagaactaacgctgctgtcctctaccacacggtccacagctataattggagtagttgccttttgtataaaccggatacagtccctgtcattttcacagttcaaggtagtggatttcgcataaatgataccatcgacgcgcctgtccacaaacattttcatatattcgatatcccgcttggaattattatttgaattcccataaatcaagttatatccggcatggcgtgccgctatctcaatcgccttagaaaggtcggcaaagaaaaggttgctgttatccggaataatcaggcccagcacattggtttttttggttatcatactcaccgccaattggttgggccggtaatccaattcatctgcggccttccagaccttgtcgcgggtttcctgcggaatgcttacatttttgttgttcatgaccagggaaacagtagcaatggaataaccgcttttccgtgctacatctttaatggttgctttcatggaactcacttccaaattttagttaaaaggttttaactgtttttctgagctcagtatagcacaagataaatttttagtcaataagcttataaattttttattttaaattatatttttgttaatttacacaatcaaaagctcttgttttttaaaaatcgagtagaaaaactgtctattataccaattccgatttttattctctggacataacaccgaagtttttattaaaacgtttatatataagcctttttcagtgagtatagtgagaaaaaaattttccattcaaacgacgatgtaaatgcaaattccggcataattttaatgaggttgaaattagctggaacctttttactggtgtaggattgtatctttagaattaaaaataaaagcgcagggacagccataccgttcccgcacttaaaactctttaactttttatttaaaatactcatggtgaggactttcgcatgagtattgggtttatttttgtgcatcttctttatatgcgaaacaacagccgccgaaagaggccggtagtaccgaggaggcgctgcgattgcgctttgcttttgataaaaaaacggagcaagcaataaaaagcttgctccgaagtgtgttcattttacaaaaaagatgccagtcaaagcgtgtggcaaaaacaaacgctccccactttcgtgaggagcgcgatgtgtgtgcaggttagacctgctggtgccggtggccggactcgaaccggcacggtgtcgccaccggtggattttgagtccactacgtctgccaattccatcacaccggcatggaacttttctattataacgtgaactccataaaaaatcaagacttaacccggcgttgttttaccggattttttaaaacctgccctgcacctagcgccttcattataaactcctactcccggcaaggtaaaggagatgcatccaggcttgttaaaaacgtatttacttgatacaacgccgcccctgtcgcctgtgtatacgccccctgcgtacccaataggaactgctccccggaaaccggaaacgcgttggattcatttatgtgttgtaagagaaaagcgacgtcttctttcatcaaaaatggagccaaatagccgctgattatgattttcccatcaaccacagcactgacattccgtatagcaaaggctaaatatttcagatattcgctccagattttcaaatatttggcttctttcttcctaacctcttcaaaaaacaatggaagcgccatgcccgccgctttttccaatgcattcactgaacagtaggtttctaagcagccgcggcttccgcaatagcacagaggcccgttcttctcgatgcataaatgctcaaaattcccgctttgcatgtggagcccctgatgtactaagccattgattataacagcgccgcccatattatggtttaacaggaacatcgaagcgctttgaatatcagggtgcctccacaactccagaaacgcggccgcttttgaatcgtgctccaaccggcacgcgtatggaatatgcttttgaaaatccgacagcttcatctgttcattgtgcatgattgccccgtagcttaccgcttggccgtcaggggaaatactgccctgcaccgcaaccgatacaccgagaatcctgctggagtcaaggccatgcgcggaaataaaggaatcaatttctctaccaagcctttcgtagtatgtatctgcatgacggtacgggatagttagaacggccgactggagcacagtaccgtataagtcggctgcgacgatataaatacactccttcagaataccaagcccaattgaaagcctcgccgtccggcatatttggattgcctgtgcctttcggcccccggtcgattcaaaatagccttttttctctattagcccttcttcctcaagggcttttaaattctggtcaacggtagacaatcccatctgcagtttttgaacaatctgcagttttgatacggaccttccacggtagatttccgcataaaccttatttttattgatttgttttaccgattttgccgtcattcccttattggccataccttcaccacccgacttgccattctttttattaattataaactttattataatcgcaatcttgagataaagcaaacgggtatatacagttgtgaatctgtacaaggaaataccgaaaatttggggattctatccctttacacaagccgttctcagctttatacttaacttatacgtaacacttacgtataagtatataaagtaaggtggttttggcatgaagagcgctgtattctatggcaagcatgatatgagggttgaggaatatgaaaagcctaaaatcgggccgaaggaggcgctggttgcggttaaggcgtgcggcgtatgcggcacagacgtacatattttcgagggggacaaaggttccgttgaggtaacgccgccggcaatcctgggacatgaattttccggtattattgtagaaaccggaaaggatataacaaatttcaaaacgggcgaccgggtctgcgtcgaccccaactgctattgtggaacctgtgacgcctgccgcagcggcatcccgcattactgccggaatttaattggctatggaacgaaaagaaatggcgcatttgctgaattttgcgccgtggacgagcgccagctatatcttcttggagaaaataccagctttgaacagggcgcaatggccgagcccgtcgcctgctgcctgcatggaatcgatttatgcgaaatacggccgggacaccaggtcgttgtaattggcggcggaatgattgggctgctgatggtacagctggcacgcttagccggcgccgcaaaggtagcgttgctggagcctgtcaggagcaagcgtgaggtcggcagaaggctaggcgcggatatctgcatcgaccccatacatgaggatgtaaaagccgtattggccgcacagggaatgacctggatacatactgtaatagaatgtgtcgggcggcccgccacaattgagcaggccaccgatattgccggtaacaaggcggtcgttatgatgttcggcctgacaaagcctgatgaagctgttttagtaaagccgtttgaaattttccagaaggagctggtattgaaggcatcttatatcaacccctatacgcagaaacgcgcgcttgacctgattgattccgggcgcctggatgtccaaagcatggtttatgaaatctgcgggcttgataagctggaggatatactaagtaagccggagctgcgcgcgctcggaaaatacatcatttcgccgcagaaataaaaagcaaaagccccgctttaagccggaaggccccggttttcagcgggctgcaaaaagcggaaagccttggttttccttgactttgtacaaggctgaatctataataatcaggataggtttagagtgagttatagatttggtggtgttttgtttgattaaaaatcttatcgacctggaagaccttcctttctccgacctgaaggaaatcattacactcgcggggaaaatcaaggacaagcccggggattaccgcgaagcgtgcaggggcaaaattatggcgacgcttttttacgagccctccacacggacgcagatgtcgtttcagaccgctatgctgcggttaggcggccagacgattggatttgacaaccccatgaattcctccgtggcaaaaggcgaaagcttaaaggatacgattaaaatcatcagcggctatgccgatatcatcgccatgcgccatccgcttgagggcagcgcaaaggctgcctccctcttttccagcgtccctctgataaacggcggggacggcggacacctccacccaacacaaacgctcaccgaccttgtgaccctatataatgaaaagggccgtctggaccacctgtgtatcggtctgtgcggcgaccttaagaacgggcgcaccgtacattctttaattaaaacgatgtcccattttccggacaaccgttttattttaatctcaacggacgagctgggcgtaccgaattatatcaaggacacgctccacgcggcaggatgcaaatacgaggaaatcaacaatctgcgcgacgccatgccgctgctcgacgtgctttatatgacgcgcatccaacgcgaacgctttgcgagcgaagaggaatataaaaagcagcagggcatattcgtgcttgatacaaagaagctgagcctcggcaaaaaaggcctgaaaatcctccatccgcttccgcgcgtggatgaaattggaaacgacgtggacgacgacagccgcgccatctattttaagcaggccgtttacgggatgtacgcgcgtatggcgctgattatgctgatgcttgaaaggccgcttcaaagcgacgagccgctcacccatacgcatatacagcgttgccagaaccccaagtgcatcacctcatcagaggagtatttgcctcacgcgttttgcggccagggcgatatgctcatctgtaaatactgcgacggcagaatgctcatataagcaaaaaatcacgggtgcaggaaatcctgcacccgtttttcttattcgcaccctttagatttatattcttttaaaaaacgctttgcgcggcttcttacgcctgcgcgcggattttggaggctgttctctgcaaattgcagcatttccccttgatatgcagacgttttataaatctgaaagaaacaatcgattatatgctccttggcgacattcaggcaatcctgcgatggttcgcctttgtggtaaaaaacatgtccgtcgacgccgagcagcttcggtacggtttgcctctccagctcagggaacgcgtttaaaattttcggcaggctttttaccgcgttgccaaacgccggtatatcctttgcgctgtaaaaggaaaggtatttttcctcaacgccctgccattcctccgcgcagataatagaaatcatgtttgcaacagaaaggataaatccccatttgataaaattattcgtgttgccgagcagcgccgccatgcggctgaagtaggggtacaaagcctcgggcgactgctcactcagccgccttacaatcttctcacaaagatatttcaccgcgcttttctcctgctcaagcaaatcgaacagcaacggcagaatatccggttctttttgaacgagcgcgatataaaacgaaagctcgcgtttttccctgagcatagatataaacgcttccctatccataggcaaatcgcttcctttccggtacgtcgcgccaattaagcgcttttactttgttccaaatatcctgtcgcccgcgtcgcccaatccgggaacgatgtaagcgtgctcgttgagatggtcgtcctgcgcggcacaaaacacctgcacgtctggatgcgccgccgtaagcgcctcgattccctcgggcgccgcgatgatacataggaatttaatgctctttgggttgcttttcttgatgatggaaattgcgtccaccgctgagccgcccgttgcgagcatcgggtcgagcacgaacacgtccctttcgtggatatccgcaggaagcttattgtaatactctacgggctggtgtgtctgcgggtcgcggtagaggccgatatgtccaaccttcgcggcgggcaccatttgcagcatggcatccagcataccgcagcccgcgcgcaaaattggtacaaacgcaagctttctgccggcgataatattcgccttgcagggcgcaaccggcgtctcgatttcgatttcttccaaatccaggtcgcgcgtcgcttcatagcacatgagcatggcgacctcgccgaccagctctcggaaaagcttgctgcctgtgtttttgtcgcgcataaacgtcagcttatgctggatgagcggatgattgaatacggttacctgtttttccattctgagaacctcacttattttgagcggacgcctttagcggcaccgcaaatttttctgcttctctctatctccccttaaaacagccggttttccttacaaccgcctgacagggaaaaacaaataggcctgctgttcctgtgggcaggtataatcctgcaccgcacccgcaagctcaagcccattttcctcaagataggcaaggccgccggaaaatgccgccatgtagtcgtccccgaccttgcagtaaatatatgtgaacgccggaattgtccattttgtccagccctgcggcggcagggcgttgtcctctgtctcaactcccgcaagataaaggcccttggtaaagttatcttcccacggctcaaattcccgctttgggccggtcatcaagccccaaaagcccgcaaggccctcttccgagcgtttggcaaggtgtgcaatctcgtcaaaatggctgtttgtgtcctgccaaagcttttgaacaaaaccttcgccttcctgcgacgcgccttcttttccaattacggaaaaagcgtccattgtacatttttgaaattccatataaccctccaatttgtgccgaggttcagccattatccccttgctcaatttttgttatcatgcctacccttcgttcatggcgtccgccgtcaaacggcgtgttcaggaaaatacccgtaaatcttacggcctgttcctcgtttataatcctgccgcccatgcagaggatgttcgcgtcgttgtgccggcgggccatttcagcgctgaaatcgtctgaaacgacagccgcgcgcacgccctttattttgtttgccgctatcgaaatgccaatgcctgtcccgcagcacaggatacccttttccgccgcgccgcttgtcaccgcgcgcgaaacctctacggcgatttcaggataatcgacagcctgtccgtcataagaaccgaaatccttatatggtatgcttttttcttctaaatacttttttacagcttccttgatttgaaatccgccgtggtccgctccgattgctatcatttccctgaaccctccattttttgtttctgcagcagctccctctgggcctgcggcagccgcagatagaccggcatcagctccgatgccgaaaccgtttgcccctgcataaatttctgcgcggcaacaaagcacacgccggacgcgcgctggtatttcaattgttcctgcgccgtctccagccgcggcagtcgcgggaacatcagcccaagagctgcgccgcttccgtcgcctgtaaggatgattcgcccgggaagctgttcaagctcccccgccagttcctcagaggaaagcgccctgtcttccgtcagccgtgtgatttgcccgtttttgctttcaaacagcgcgttataaaactgcctgcaccgcgcgtccatgacagcgcatatgacgcattcggttcccttgaggttctgcgccatggcctccagcgcggaaacggagacgcacggctttgaaagggcctgcgccattcccttgactgccgcaacgccgatgcgcacgcctgtaaacgaaccggggcccgcggaaacagcgaacgcatcaatttcttttatatcggtcatcgtgtttttcagcagcgcttcgcacatggtcataagcgtgacgctgtgggtcagcttcgtgttgataaaaaattcgccgaggattttgccgtcctcatatattgcggcggacgcggggcccgccgtggaatcgattgccagaatcttcataggcgtatgtccccctcaatccggaatatgcggctgttctcatccgcgcccatttcgatatagatacgcacagcgtcttcgggcagggcgttttctatgttctcgctccactcgatgacgagcacgccgttgccgagataatcgaaaaaacctgtggaatacaaatcgtcccaaccggtaatccggtacatatcgaaatgatagacggggaatctgccgttatattcgtttacaatcgcaaaggttgggctcgaaacgccgtcttctatgcccagcccctttgcaagcccccttgtaaaggcggtttttcccatgcccaagccgccgaacagggcaagcacctccgtacccctgagcaggccggcaagcctttcgccgagcgcctctgtttcgcgctcactcgcgctttttattgttatcatcaagccttcagtccctgaaccttaaaatttatagccagtcaaaacaggccggaaatcacaccgttttcatttacgtcaattttttgcgcggcgggcgctttcggaagcccgggcatcgtcataatgtcgcctgtaaagacgacaacaaagccagcgccgtttgaaaggcgcacgtccctgaccgtaatattaaaatcctccggcctgccgagcagcgaagggtcgtcagacaaggaatactgcgtttttgctatgcagacgggcagcgtccccgcgccgagcgcttccgcctctttgattgccttttctgccggcgccgtataattaacgccgcgcgccccgtaaatttttgtggcgaccgcgtttattttttctttcagcggaatatcaagcggatagcagggcttgaaagcagagggcctctccgctgccgcgcataccttttgcgcaagctccataccgccctctccgccttttgcaaacacctctgacagggcaaaatccgcacctttttccttacaataccgctcaataagggatagctccgcatttgtgtccgtgtcgaaccggttgattgcgacgacgaccggtacgccgtacgagcgcatattgtcaatatgcacgcccaggttcacaatacctttttcaagcgcatccatattttcatttttaagctccgcctttggtacgccgccgttatatttgagcgcccggcaggtggctaccacaacgatggcgctcggcttgattcccgcatagcggcacttgatgtcgagaaatttttccgcgccgaggtcggagccgaagcccgcctctgtaatgcagtaatcggcaagcttgagcgcaagcctggttgcgcgcacagagttgcagccgtgggcaatattagcaaacgggccgccgtgcataatcgcgggagtcccttccagcgtctggacaaggttgggcataatcgcgtcctttaaaagcgcagccatcgcgccctgcgcgtttaagtcgcgcgcaaagaccggatttccttctgccgtgtaggcgaccaggatgtcgccgagcctctttttcaagtcttctatatcgtttgcaaggcataggattgccataacctcgcttgctaccgtgataataaaaccgtcctcacgcgggacgccgtttaccttcccgcccaggccaacgataacattgcgcagcgccctgtcgttcatatcgaggcagcgcttgattaaaatcctgcgctggtctatttttaaatcgttcccctgctgcaggtggttgtcgagcatcgcgcaaagaaggttgttcgcgctggtaatggcatgcatgtcgcctgtaaagtgaaggttgatatcctccatcgggaggacctgcgcatagccgccgcccgcggcgccgccctttacgccgaacacagggcctaaagacggctcgcgcagcgcgataatggcgttcttgccgattttcgccattgcctgccccagccccgctgttgtagttgtttttccctcgcccgccggcgtggggttgattgccgtgaccaatataagcttgccgtcctttttctcattcagccgctcaaatagacggtcgttgagctttgccttatacctgccgtacggctcggtttcctcctcgagaataccaagctggtgcgctacctgcgcaatgggccggagtttacactgctgggcaatttcaatatctgtaagcattggggctatccctccgaaattcagattttctgcgtaaattatatcacataagacatagtcaaacaagtatgaaacggggcaaatttaccgagcggttcgtcccccttgcgtgaaaaggcccttagccgcgcaaaaaatccccgcgcaaaacttgcgcagggatttataaagctattcatttttgctgactgtaatattcgcggtatattttacccggctgtacgcccagcaattttttacacccgttacctcgattgtcaccggcacctcggtagagccgacgaagtcctgccctaagcttttcaggtcgattacagcagacaggtctgaagaggaaaggtcctcaatcacattgtcggggccaacgatagttacatcgactgccgacgtggcaggcgtggctgtataaccgcccggcaggtttttaaaattgaatttctttaccgtctgcctcgtggtagaatagcccgataaatcgagcgtcaccgtaacctgcgtgatattgctgatgtttttacagccgttgggcaggtcgacctcgcgcgtaaaagtggtattcgcgggcgaaatttcggtaaaatcaatcggctccagctcaaccgcttccagcttgccgatggtatcctccggtccggcaatctcgatttcatccggaatcaattttgcaaagctatccgtatgaaagcccgccgggacgtttgtaaacgtcgcctccacaggcagctttttcttaggcaggacggaaatcgtgaccgtgaccgaatccgcgctggttgtaatcagctcatttttaatctcgccgccggccgcgtcgtacagtataaccttatagtcatttttataggcggaggtcaaaacgccgtcgaccgtcccgatgacctctgcggaagcgaccttcagcacctctgactgcggaccggataccgtaattttgtccgtagacagaatgggagacgccgcataataggtcgggtctaccttatattcgattttatcctggatttcaagcgttttctggctgtagcggtcaacgtaaacgcttgcaaactgcggggaaaccgactcgattttaaatgttttgacgctgttgttctttgcggtcagctccaggctgtaggtattcggcgtcaaaattgtattggctgcctgctccgccacaacctgaatatcttcctttgttacagtaccgagcgtcaggcggttgccggaaatctggacggtggcctttgtatcggcccccgtaaagatgacgagcccgtcttcctttgcctggtcgctcagctggatggatattggaatatctgaaatcgacgcggttgtgtccacgccggaattctgcgaaaaaaagagccacaggatacaggccatcaaaaaagagaaaacaagcaggaacttattgttcttaaagagcttatcgagggtaatttttgattttccagtttttttattttttggaacagccctttttgagccgaacgcttttttatttttgctcatgcttcttctcctttctcttggacgagaaaatgggaatcagctccacaatgtccgttttatctgccggcaggacaagctcctccaggcgttccataagcgcctcgcgggtataatcccttgtaagcctgccgcggtaggcaattgatatattgccggtttcctcagaaacaacaacgacggcggcatctgaaacctcgctgataccgagcgccgcgcggtggcgcgtacccaggttaatatcgacgtcctcattcttagtaagcggcaaaatacagcccgccgcatataccctgccgtcgcggattacgacggcgccgtcatgcagcggcgctttattgaaaaacaggttgccaaacacagaaacagagggcgcggcgtcgacaatcgtgccggtatcgataatatcgccgagcttggtcgagcgttcaaagacaatcagcgcaccagttttgctgcgctggaacagaattgcggcgtcgcagacatcgctgatagccttacgctgcatggcaatcagctcgtcgtcctgcttggattgcaggctgaattttttaaagtttttagagaatttacttcgccctatctgttcgagcgctttcctgatttccggctggaatacaataaacaaaatgaggacgccaaactcaaagaaattcttgagcagggcggtaaacattgtcagctggaacacaaacgccgcaaaataaacaacgagcagaattacgacgccctttaagagctgctccgccctcgtttcctttaccaatttaaaaataccgtatattacaaaagtaatgcagagaatatctacaaaatctttgaattgaaaggtcttaataatggaaagaaaagagctgaaaaacgagataatataatccatggttttcttccttccgtttactttggaacccactgcctattcatttattattctatcacaaaacaatcctgttgcaaacacttttttgtcaggcgccgctttttctcatgcgcgctacgccgaaagccagccggtctatctgcgccgcatttgtaaagtatgaggggcttacacgtaccgcgcccgtttcgagcgtacccattgcggtgtgcgccgagggcgcgcaatggagtcccgcgcgcagggcgatatcaaaattgcggttgagaaaatcggccaccgtctcgctgtcatagccctttacgttaaaggacagcaccggagaaaaatagtctatggtcggcttttccgtatagaggaggacgccgggcgtatttttgaatctatcgtataaacgccgcacaagctccatctcatgccgcgcgatattttcctgttttacgtttgtcacaaaagaaatacccgcctttagcccggcaataccggggaggttcggggtaccgctttcaaatttatccggcatctcagacggctgttcaaatgatatcgagctgctgcctgttccgccttgtgtcagggtggaaagcctgtctgcgcaggccgttatgaggatgccggtacccatcgggccgtaaagccccttatggcccgccatacaaaggtaatcgatatgcatatcctgcacgtcaatcggcaaggttccggcggtctgtgccgcgtctaccataaactgaatgccgtactcatggcacagcgcgccgatgcgcccaatcggaaggcgcacgccccagacattcgaggcatgcgtacatacgacaagcttcgtatccctgccgatagcattgcggaaggaatcgaccgttttgtcattgtcgcagggataaatcttagcctgcgtaaaggtaacgccgtttttttcgagctcatggagcgggcgcataactgaattgtgctccatgtcgcttacaacaacgtggtcgccgctcttcaaaagccccttgaatacaatgttgagcgagtgggtgcaattgagcgtaaacaccacatgctcctctttttgcgcatgaaaaagcgcggcggcctttaccctgcaatcataaatttctttggaggatctcatcgattgtttgtggccgctgcgcccgggatttgcgccatatactcttaacgcctcatccaccgccctcgaaacctgcggcggcttcgggaaggtggtggccgcgttgtccagataaatcacggcatggcctccctgtccgtacggccaaggaccataataccgttgtcctttaaaatctgttccgcttcgtctgtcctgcgcggaacataaaggctgtagccgcagctgtattccccgctgcgtttcggggtccgttctatatcggcagaaatcccctcatttaaaaggattgccctgcctttcattgcatatgtgatggaagtcagcataattaactgcttgcccacatatatcacctcgtttctttttactaccatgatatgcagatacgaggggttatgtgtacaggcttgcgcgcaccctgtacatccatgaaaagcaggcattctgtggttgaattattatgagaaccgcccgccgaaaccgtcgccgaaattgtcgtcgccggtgctttcaatcgtctcgccgtcttcgtggccgaagccgtcgtttatgatttcgcccctgcgcatacgcaggcgcagcttttcctcctccacaagataggaaaggttgtccttgaattgctgggagttgcggatgtttttcacaacgagcgtgggctggaacttgtcctgcgcctctacaacgactgtgccaagcccgaacagcttttgtatgagagtacgcgaaagggtcatatcgagcacgcggtacagcaggatttcgtcttcccggctcgtgaaaaagccggaattaatcaatattttgcggttggtgagcgtgtactttgtaaaggtaaacggcagcccgaaaagaagccagcgttttctttcctgctgcaccacctccacatcggccggtttgttcattgcgcccacgttcggggcattcggcgcgtattcttccatttaaaattcccctttctcgtttcagtggttttatgtttgcccatcagcaaaatccgcttatttacgggctttctgaacgcttagttgaatcatttcatacgcggcgcgtatatccttctcataatccgacttgatttccacacagggaagccctaagccttcgcatctttctttgagcctgctgtttgcaaaaagaagggcctgcttatcgatatcagccgttacgagccgcttttccattatgttttcgtgcgcaatgattttatcaaaatgcctgtcgatatattcctgcgaaaagacaagatatatacaggcgacctccttactaagcagcttttttactttctcgggcggaagatagcagccctcaaggataatgtcctgcttattttcaatgcaggtgtttattatcccactgacaacgccccaaagtttttctgaaattgcgtcgctgccgtcgtaaaccgtgaacccgcagtcctgatacccatggataagccccattttgatgtggtcgaggctagtatacggaaaatggtattgctccagcagcttctgtgccagcagcgttttgcccgtgtgggtttctcccccgattaaaataatcattgcctttcacccgttccttttgcaagcgttttctcagtatgaagcattccgaaaatctattctccaaacgaaatgccaatctgcttagcggtttttacaacctcgcagtcaaccggcacgctcttgagctttcccgcgacctcagacagcggcacgggcacaacctggttgtttacaagggcgaccatgcagccgtactgctttttaataatcagctgcgccgccgccgcgccgaagcgcgtggacagcaccctgtcgtacgggcacgggctgccgccgcgctggaaatggcctgggacggtgacgcgcgtctcctgccctgtcgcctgctcgatttcctgcgcaatctggtaggagatagacgggtatttcagcgcggaaagcgccgccttcattttctttttcggcatggcggcaagctccttggatacggcgccctccgcgaccgccaaaatagaaaagtttttaccgtttttcgtgcgcgttttgactgtttcgattacggaattgatatcgtatggaatttccggaatcaggatgatgtcggcgccgcccgcgatacccgcgtaaagcgtcagccacccgaccttatgtcccataacctcgacgatgaacacccttccgtgggaggtggcggtcgtatggatgcagtcaatcacgtttgtcgcgatgtccacagcgctctggaagccgaacgtcatatcgctcccccacaggtcgttatcgatggttttcggcagggaaacgacgttgagcccttcctcacagaggaggttcgccgttttctgagtgccgttgccgccgaggatgacgaggcagtcgagcttcaattcattgtaatgctccttcatcgccttaaccttgtccacgctgttttcatccaccacgcgcataagcttgaacggctgcctggaggtgccgaggatggtgccgccgcgtgtgaggataccggagaaatcctcctgcttcatcaggcggtattcgccgtaaatcaggccgcggtaaccgtcgatgattccgtaaatttccagcccgtcgttcccgaaatggccgtagagcgcctttgcaacgccgcggatggaggcgttcaggccctggcagtcgccgccgctcgtcaaaattcctaccctgtacatgtgtcacacttccctgtccatttattttttatcccctgtatggatgtgagtcggcagaatcggcgtgccgaccgttttgctctcttttatcttcttattctttctcagctctttcttcgcaagctctgaaaattccgtctgggaatttaccacgcgcttgccgcgtttatctatattcagatatgttgtatctggcagctggatacgcgcgtttaccgtgtctgacaggtgcaaatcaagtattgcgaggctgcgtttcttcagcgcctcgtcctccaccgggaatacaagctcaacacgcttgtcgaggttgcgctgcatccagtcggcgctgcccatataaacgaccgggtcgccagcgttctcaaatttaaagatacggctgtgctccaaaagctgcccgacgatactgcgcaccgtaatgttttcgctgattcccttgagccccggaatcaggcagcagataccgcgcacgataagctttactttaacgcctgcctgcgacgctttatacagcaattctatgatagacgggtccacaagggaattgaccttgaccgtaatgccggaaggaagcccctgctttgcgttttccgtctcttttttaatcatatcttcaaagaatttgcgcatacctgtgggcgcgacgataaatttattatactccggcgggatggaatatcctgtcaaaacattgaacaaagaagaagcgtccgtaccgtattcctccttgcaggtaaacatgccgatatccgtataaaatttcgccgtgatgtcgttgtagttgcctgtgcccatatgcaggtaccggcggatagcgtcttgctcgcggcgtacgaccaggcagattttacaatgcgttttaagccctgtcaggccgtagatgacgtggcatccggccttttccagcttttttgcccagtggatgttgttttcctcgtcaaagcgcgccttaagctccacgagcaccgttacctgcttgccgttctcagccgcccggatgagcgccgcgataatcggcgaattgccgctgacgcggtataaagtctgcttgatggcaagcacgttttcgtcctcagccgctgttttgacaaagcgcagcactgcgtcgaagctttcatacgggtggtgtaccagcctgtccttttcccggatagcgtcgaatatattgtcgtagccgtagaagtccgcgggcgggcttaccggcacaatcggttcaaagaacagctccggcgtgccgcaggccgacgcaaatttggaaaggaacgtcaaatcaagcggccctgactgctcgtaaatctcctgctcgcctacatccagcatatcaatcaggaagcatttcagctcctcgtcgcactttttataaagctcgaggcgtacaggcttgccgcgcttgcgctttttaatagatttttgtatttcctccatcaggtcgtccgtttcctcgtcgatgtcgaggtcggagtccctggtaatgcggaacgtacagaacgcctcgatattataaagctcaaacagctccggcagcttatccatgataatactttcaagcaggataaacgccctgccatcatttgcgggaagctccaggaagcgcggcaggatagacggcacctgaagcaccgcgaacacggactccccttcctcgtcggtcaggcgcacagctatattgaggctgcggtttgcaagcagcgggaacggcctgctcgtatctaccgccattggcgtcagcaccgggaaaacgagccgctcaaagtagtcgccgataaatttcttctgcttgtcgctcaaagcgcttaccgtcaggatttgaaggccgtgctttttgagtgccggcaggatggagcggttgaggcagttatactgcttttttgaaaagtcatgtattttagcggaaagcctgtccatctgctctaagggcgtaagccccgccgggtcggggtatgtgtacccctggtggatttgctccataatgcccgcgacgcgcaccataaaaaactcatcaaggtttgaagcggtgatagacaaaaactttaagcgctccatcacgggattttccttttccgtcgcttcctccagcacgcggatgttaaaatccatccagcttaattcccggttgttgtacggcatggcatacctttctttctcaggcgccggtttttgctgttctttttccttttttgccacagtttcttctttccttcctttgtttataacttaaaaaggcgggccctgccggccggcacaagtaaatgcgcgggccggagcagactcccgccccaacattcctattgcgtttataatgcctttacgcaccgctcgaccgcgtccagcgttttctcaaaatccgcgttcgttacgagcagtgaaatctgcacctcggatgtcgatataatccggatatccgggtttaccgcagaaaccgcccggaacagctttgccgcaacacccggcttctgcgccatgccctcgtcgagcacggatatgatgtagttgccgccgcttacaatcgccttggctttaccgccctccaggctcttggtatattcgagcagcctgatgagcgattcgtcccggatggtaaaggaaaggctcgtctgcgcaccctggacaggcgacagcgaaataatgtccacgtcgatgtccattaaggcaattttttcaaaaatctcagcaatgacagccatttccgccgggatattgtgcagggaaaccagcgtgatttcttcttccactgtaatctgcgggttcataaaggtcatccctttccgaatttattttgatgcgagcaggtcggacatattgtaaagccctgcttcctttccgttcaggaacaccgccgcgttgatggagccgacggcgaatacctctttggaatgcgcttcgtgcttgatggaaagcacctcgtcgtggccggcaaaaataacctcgtgctcgccgacgattgtgccgccgcgcacggaatgaatgccgatttcgtttttctcgcgttttttgcggtaggcatgcctgtcgtaaacgtactgcggctctttatccataacctctgaaataccgtcggcaatcatcagcgccgtgccgcttggcgcgtcgattttctggttgtggtgcttttccacaatctcaatatcgaacgcgctgccgaaaacggacgccgcttttttggaaagctcgataatcaagttaatgccgagcgacatattgccggaatggaacacggcaatctcctttgccgcctccttaatctgctgtacctgcgcggtagaatagccggttgtacagatgacggccggaagctttttcccacgcgcgtgggagagcagcccgtctagtacgacggggttggaaaagtctataatgacgtccgcttccgtgtcgatttttttaaaatcgttaaagaccgggaagtcatacccgcagtccgtaaaaatatccacgcctgcactgatgaccgcgtcttccctgtcggccaccgccttgacaatcgcctgccccattttgccgttgcagccgcttaaaataatccttgtcatttcacattcctccgaaaccgcgctttaaatcagcccgtatttctccatgcaggttttgagcttctcaaagtttgcgtcgttcatttcaacgagcggcatcctgcattcgccgcagtcgaagccaatcaggttcattgcagccttgattgggattgggttgacgtcgcagaacatgacgttcatcagctccagatatttaatgtgcagctttgccgcttccctgcacttgccgtcaagcatgagctttgtgatggtgtgcatttcctttggcataaggtttgcaaaaaccgaaataacgccgataccgcctaaggacatgaccggaaccgtctggtcgtccgcgccggaataaacgccgaaatcatctccgcacaacgcaaaaattttcgcaatggaggatatgttttcgctcgcctccttggtcgccacaatgttttcatgcctggagagcggtacatacgtttcaggcttgatacagcagcccgtcctgcccggcacattataaaggatgattgggatatttacgctgtccgcaatcatattgaagtggcgtacaagcccctgctgggaggttttattatagtaaggcgtaaccgataaaatagcgtccgcgccaaggcgctgcgcctctttggaaagctcgattgcgtatctcgtatcgttgctgccggttcccgcgacaaccgggacacgcttgtttacgcgctcaaccgtataggaaatgacgtcgcagtgctccttgtcgcttaaaactgccgattcgcccgtcgtcccgcaggagataatggaatccgtgccgttttcaatctgaaagtcaatcagccttcccagctcgtcgaagttaatcgagccgtcggccttcatcggcgttacaatcgcaacgcccgagcctgtaaaaacaggatgtttcatttctgcaacccccaattgctttgtatgaaattatgttatggattaatttatcagtccaaatagccttccgcgcagaggagctccgccatcaataccgcgccgcctgccgcgccgcgcagcgtgttgtgggacatgcagacgaattttatcgtatactgcgtatcctcgcgcaaacgcccgacggaaacagccataccgttttcaaggttgcgctccgatttaatctgcggcctgtcgttctccctgaaataatggaggaactgcttcggcgcgctcggaaggtccagctcctgcgcccttcccctgtagctttcccactttttaataatttcttccattgaagcctttttatccagctccacaaaaacagccgccgtatgcccgtcgctgaccggcacgcggatgcactgtgaagtaatgagcgggctctgcgcgtttacaattttatcgccctcgacgcggccccagattttcatcggctcctgctcggacttctcttcctcgccgccgatatatgggatgatattgtctaccatctcgggccagcgctcaaacgtcttgcccgcgccggaaatcgcctggtaggtgcatgcaagcaccttgctgacgcccaaatccatcagcggcgcgaccgccggaacgtagctctgtaaagagcagttggacttgacggcgataaagcccttcttcgtgccaaggcgcttacgctgcgccggaatgattttcgcgtgctccgcgttgatttccggaataatcattgggacgtccggcgtagagcggtgtgcgctgttgttcgagataacggggcattccgcttttgcgtacgcctcctcgagcgcgcggatttcatccttcttcatatcgaccgcacagaatacaaaatcgacaagggaagcgaccttttctatctccgccgcgtcgataatgaccatatccgcaagcttttcaggaaccggctgcgccattgcccagcggccctctaccgcttctttgtatgtttttccggcactgcgcccgcttgccgcgagagccgtaaccgtaaaccacggatggttttcaagcagcagggaaaaacgctgccctaccatgcccgtcgcgccgataatgcccaccttgtattgcttcatcgtaaatcctcccagaacccacgcaaattgaaaaacttctgaaaaaagttgtcaaccggtgtattatttaatataataagaagaagcagccgctgccggagccttcccgttgcccctgagcggcttccttccggggcagtgcgcaaacgcgcttttaccccatactttataccattctaatataccattcttagtgtatgttgtcaattttaaaaagtgaatcttttgtgaaaggaccttatccgcatgaaaacaagcgacttttattacgacctgcctcagcgcctgattgcgcagacgcccatcgagccgcgtgacagctcgcgcatgctcgtgctcggcagggaaaccggggcaatcgaacatttgcatttttacgatatcctggacaagctcaatgaaggagactgcctgattttaaacgattcgcgcgtgcttccggcacgtatttacggcatcaaggacggcacgggcgcgcgcgtggaattccttttgctcaaacaggcgcgcggcagcatatgggaatgccttgcaggccccggaaaacgcgcaaaggcgggcgcgagcttcgtctttggggatggtattatgacgggcagggttttagaggtgcaggacgacggcaaccgcctggttgaattcatatgcagcggcggggagaattttttctccgcgctcgataaaatcggccagatgcccctgcccccttatattacggaggagctaaaagacaaggaacgctaccagacggtctacagcagggagctcggctcggccgccgcaccgacggcaggcctgcattttacaggcgagctgctcgaaaaagcaaaggcaaagggcgtaaaaatcggctttgtcacgctccacgtgggcttaggaacgttccgccccgtcaaggtagacgacgttacaagccataaaatgcattccgagcattacgaggtgccaaaggaaacagccgcgctcatcgcccagacgaaaaaaaacggcgggcgtgtgatttccgtcgggacgacaagctgccgcaccctggaggctgtcgcgacagagcacggcggaacggtcgttccctgtgacggctggacggatatttttatttacccgggctaccggtttaaagtgctcgacgggctgataacgaacttccatttgccggaaagcacgctgattatgctggtatcggcctttgcgggttacgacagcattatgaacgcttataatgaagcggtcaaaaaggaataccggttcttttcgttcggggacgcgatgctcattttataaaattcagatgggagatgccgcatggcgcgcaggcgtaaagctggttttaaaataggcaataaagtccccggaaccatatggttccggggactttattgtttcagaagcagtttaaaccacgtttttcagaggggaaaaggcacattgcgtattttatttaactgtacagcgcaacaagcagaccaaatatttaaaggtcagcatacaaaacagtggaattgccatccctgccatttgggaaaacaacaatcatatttgctaagtatttctgtatttccaggctgtctgcattggttacaacgccgtccccgtttacatcagccacctctttctggtcatcagtcagagtgattgcctttgccaggtagttctgaatgactgttgtgtcgagtatgctgaccgttccgtcaaaattgacgtcgcctgtcttttcaagcttgcaccacttcatttgaatatatatattgtttaaggggtcgtccaaatcatcttttgtaacgtaaaggagctgtttggttaccggcaccccgccgacatttacaaactctttgataaaagaatttctcaagacgatgtttttcgtatcgtttttctctgccggagaggcacttgatctatgatatgtattgccggatatggttaggtgctttacaccctggaaatgtataggggtggtatggatattctgaaattggttattttgtaccgttatattctcttgaaaaattttattggcggaatcaaaaaaatggtcgccaacgcctcttattacatcattgaatacacagtttttaacggttatatttttacttaccgtgtcatcgccctttattttacaggttggccaatttttatatatttccgcttccccagtatcatacgtcagtgctgaggcgctttcaaattgtatgacctcatggtttttaagggttgactcgattgtatttttgtctcctgcgcctaaagcggtgtaatgtgcatagtttacgttcatgctcgacttgtacatataaacgatatctctgaatacacagctgctgaccgtcacatccttcatggagttaagctcgattacatggccgaccctgccggtataaacctcacagttttcaatcttgatattttgggcgtgcgcaaatttaaaggtatctattatcctgtaatcctttaattgcgtaccgtttttaaaattttcacctgtttttttatttccagttatttttatattcttgaaagacagattgcccgaaccattgtagccgccgacgttcgcgtcgctttcatctgtgttgataaaaaccgaatagtcgttttgcttgcacaaaactggatttttagtttccaatttatcaaagctcgtatcggaatagaccctgtacggaccataaacatcaaaatagtcgtagcttattttgatgtcgagcttgacattcgagggcttagcaagattcaggaccctgctttgaaagtcaaattttaccccattggcatttgactctgagtcgattatcactgaatttttatataactgccatgaagcgggctttaaaaccagctcatagctgtcaatcacatttcctgtgcttttttcccttgtgacaaaagtaatattgtttgttgtacccgcagtattgccgattctaccgacattatttactcccgacgttaccgttttactgctgtctatcgtccctttagaatcacgggttatccattgtatcggcgttgctgcattaacagaattggctgtagctattgccgctaacgcaaagatacaaatcaaagacaaggtttttaaaaaatttttcatctttattccccatcgctgttaattttctcaggtatgaaatcccgcgcacaatttctcctcttccgcgtgttcgaagccgcacctggctgaactatgtatgttgtcggccctgataaatcaatttttcattttgttcccccaatctattaaagcatcataactatttttttgtcttttcttttgtctccctttttactgaattaaattttaacattatagttattatttatatttaattgcatttttcaaccaataatttattcaaattataccatcaatgaactatacagtcaacaaggagcgcaattttcatttgcgcacattgcaaaaaattcaaaaaatgttataatggcttaaactatgaggggccgcccatgaataaagcgcgggcgatttaaccaaccagccatataagcggaggggaagctcagaatgaaaatagattttaaccaaatagaggaaacctgtatcatgaattttcgcggcggcgaaaaggaaaccatcgcgaaaatgtttacagacgagcacaaccgcatcatgctcggcaggctcgtgcccggcgcctccatcggcctgcacacgcacgaagcaggcagcgaaatcgtctatattttaagcggagaaggcaaagcgctttatgacggcgggcaggaaacgctcacagcgggcgactgccattattgccctaagggccatagccacagcctgataaacggcggcggcgaagacctcgttttctttgccgtcataccgcagcagtaacaaaaagtgaggaaattacctatgtttacgattttaaaagaagacggctgcgcgcgccgcggggaatttaaaacagtacacggtacagtgcagacgcccgcgttcatgaacgtagcgacctgcggggcaatcaagggcgcggtatccgcgctcgatttaaaggaattgaaatgccaggtacagctctgcaacacctaccatctccacctgcgcccaggcgacgagacagtaaaaaagcttggcggcctgcatgaattcacgcgctgggacgggccgattctgacagacagcggcgggttccaggtgttttcacttgcaaagctgcgcaatatcaaggaggagggcgtatacttttcctcccacatcgacgggcataaaatcttcatggggccggaggagagcatgcgcatccagtcaaacctcggctccaccatcgcgatggcgtttgacgagtgtgtggaaaatcccgccccgtatgactatacgaagcgttccgcggaacgtacaacgcggtggcttgtgcgctgcaaggaggagatggcgcgtctcaattcccaggagggcaccatcaacaggaaccagcttctctttggaattaaccagggcggcgtctatgacgatttgcgcatcgagcacatgaaacaaatcagcgagcttgacctgcccggctatgcggtcggcggcctggcggtcggcgagcccacagaaacgatgtaccatattttagaggagctaaacccattccttccaacgggcaagccgcgctacctgatgggcgtgggaacgcccgtcaatattattgagggtgtgtaccgcggcatcgatttgttcgactgcgttatgcccagccgcaacgcgaggcacgggcatttgttcacatggcagggctgccgcaacctgatgaacgcaaaatacgagctcgacacacgcccgatagacgagcagtgcgattgccccgtctgccaaaattttacgcgcgcttacctgcgccatttgttcaaaagcggggaaatgctcggtatgcgccttgcggttatgcacaacctttatttttacaatacgctcgccgcaaaaatccggcagtcgctcgacgaggggacctttggcagcttccgcagtacctatgcggaaatactcgggaaaagaatctgacagattttgcttgcaagtgggcataattatgttataatgttaaaagccagcgctttgagcgcttatttacgagaggaatgataaattaaatgaagaaaagaatagctttgaccatctcagccatcgtgtttttgatggtgacgctttgttcctgtatgcccacaacggccagcggttccggtggggacgccgcaggtatgggcggcggttctatgtggctgatgattcttgtttatgtagcgattttcgcggcaatttacttctttatgatacgcccgcagtccaagcgcaaaaaacaggaacaggccatgcgcaacaatctcgaaatcggcgatgagattacgaccatcggcggcatcatgggcagagtcatcagtatcaaggaagaaacggactccatcgtgattgagacggcagccgaccgcaataaaatccagctcaagcgctgggcaatttccacagtcgataccattaaggacgaaccggcggacgataaagccgcgaaatccgagggcggcggcttcttcaagaaaaagaagaaaaaggacgacgaggaataatcacgcgttcccgcgtataatcccctttcgttttgcatacctatggaatgagaaatccttccataggtattttttatgccttttggagcggtgaaacaagacagaacgggggccttgctgtgaagggcaaagaaaatagtatgaacaaaggcgtaaaggcggtgatgttcggcgcggtcggggggcttgtcgtctgtaccgctctgctgctgattgcctcgttcgcgcttgcccagatgaaaagcgtgccgggcagcgcgattggaaccatcaccatggtctttggggcgtttggcgcgcttgcgggcggatacattgcggtgcgtatagcccggtgccgaggcatgatgtacggcattctgacagggctcgtgctctttctcgtcgtcgtcattgtcggcgtgtgcagctcaagcgagagcgtaacgattgcgacggtcatcaagggaatcgccatgctcctgtcaggcgctatcggcggaattgtagccgtcaacaaaaaacagagggtcagataagcaaaagcctccgggacattgtccggaggcttttttgttttgctcacacattttcggctcatgcatatgatgataacaggggctttgattcggacaagtctccaaaactattgtacaagcccaaaacctgaaaggagcataatgagtaaagatgaaaacggctacaagccgtatggcccggttgagccgataacggtcaccggacagtacccaaacgcaaccatcacctattacgatatctataaggatgatacggacagcagaaaagataccagcaacaaggtacagtttttacaggatgccatcctgaaacaaaacctgctgcattactggtcgcagcttgcataccagatattcaaaagcaattccaaaatctattttgaccatgccggcaacggctgggacaaggattttggagaagatcattatatggatttgatttaccatttgcaaaacacaacctcagataaaaaagtaaaaagcaccgggctgacctactgcaaaaatcttaaagatgtccaaaaggctgctgacagctctattgccgattttattgaccgtaaggtcaaggcggatgacttcaaaaagcacagcccgatagatgaactggacgacgatacgcaacgggatgtcttttatacccttgcaaccatctatgaccggtacggtggaaccttccaatacgcatatgactgctttggcattgcattctacgattttgaactgaatattctaagcgacggtacgctcatgcatacagccttgggcaatatgacacttgaagaagccattgaaaaaggaagtaccgtaccgggcttttcctacagcgcttccccgggtaaaaaaacgacaagcagcgtcacaaacggaagcgcgcaggatgttgcaagcgaacagacaataaaaaaggatatgaccctgactgactcaaacagtatgacaaacacaaaggaatacagcttttctgaaatgattggtgcagactttgaggtatcgaaggtattgccccacctaaaaatcaccgcacgggtcgaattcactgcgggacaggtgctttccaccgcatatacggaaacaaaatcggtatctgaaacagattcccaatctgcctcaatcagcctatctgttcccgcgcatacggaaatcacgatagaacaggaaacgacaggttctaccgtaacgctttcctacgactgtcctgtttccattagctataaaacggcacttttcgcactttgcggtaccttctatgacgacaactgcctaatccagtccttcacgacggctggataccaccagcggtcgtttatcagtatgtttggcaacggcagtcaaaatgcaattgagaacctgtatagcagggcggtcgtcaataaagacgtacccggaaacgacaaagcctccgccacaacctgtggaagggagtatgacgaggatgattggatgaacagccttgactggaatagcctttttaagaataaaagcaagcccaaaagcaagaatatcgatgagtcgaagctttctacgacggaagagctggtaacacagctcaccaaaaacgcacccatgtcacccaccggcggtacgctggcgagcgaggcgacaagtatccattccaccgtatacgacgcagtcgcgctgtatcatctgaaacgcatcaaaacaatggatgggactgtggagtacaacatcggacttggcgacatcatctacgcaagcaatatcggcctgcagggctttaatgaacagggcgtcttgtattatggattttcctccgacaagggccgctggagccttgtggacgaggacgacaacgaattggaggacgacagtattgccgtgctggaaaccgaccctgcctcaggaattgtaaccgtgaaaggcaagggagccggtacagcctatatgaaatactggattgacgagggagcctaccttgcaaaagacggcgtgatggcgacaaactccaatatttcaaccgcccgtatcaaggtaatcgtccatgatacaaagcttgacggtacaattaaggtaaagggcagcgtaacggcatatgccgatgacgagccgcttaatctagataccctggataccattaccgcttatgtgtatgacgaaacaggacgagagatttctgtccctgtgatttgggaagcacaggagctttcaagcaggggaatcactgtagagcacaataagcttaccgtaacaaaaaaaggcgatttccacattcgggcggcttatgagggaatacactcaaactgggcgtcagttaccgctctcgaccatataccgctcgattaaaaacacaggaaatgcctccggctcgagccggaggcattttttagttccgtgtggtttatacgtcgcccgaaaggccgtccgctacgcccagcagggcaatcccgaccataacgagcagaatgatgagatactgtttttttgcaagcttttccttgaggaaaaggcgcgaaagcagcaccgagaacacacagtaggacgaaatcatgggcgccgcgacaatcgcgttgtccgcaattgcgaatacatagaaaaactgtcccgctgtctcgcacaaagcgcccgcgcccttgacgcgctcgttccaaatgttgaatttctgtttcctgataaaaaccagataaataaacgcgccgattgcgcacagtaaaaatgttaattcgtaagaaatattcgcctggtcctcggacagccagttgtccagcacaagcgcgtccccgaacgtaccaagcccgtcgatgatacagtataaaataggaagtaaaatcgcgataaagctgatttggtactttttatcgatgacgaccttccgcctgaggcgctccttctcgtccatatgccgctcgtaaagggaaagcagcaaaataccgcccaggatgcagatgacggcgacaatctggataacgctgattgtctgccccaaaatgaagaagcagagcagcacggttacggcgccggaggaattgcagatgggtgatgacacggaaagctccatataccgcagccctgcgtacccgattgtcatagacaatatgtacataaacgaaacgggcaggtatttgagcatattaatcggctcataaacaaagcccggttccgtgttcgtcttatagatggtataaataatcgcatggatgcccatgacaaggccgaccataatgaccatgcgccaatggctgtacttgtccctggggttggtgcccattttggaaaacaggtctgagccgccccatgcaagcgccgtaatcagggaaaaaataaaccacattgttacataactcctcaaacaaaatcaggtgccattatatcataaagaacccttcagaacaagttttttattacgggtttcgtcattttttaccgaatatgtgtatgaaacctgttttgacaaaaacaagggaggaaaccaaaggttccctccctgttatctattttatctattcatcagtaaattacggcaacctgccccgcccctacggtaccggaaagcttaccgccggcaacagtgaattctgtgtcagtcagcttttctttgtaagagccgtccgcaagcaccgtggtgacgtccttaagcgcggcgtccttgccgcttacatttataatcaccgcgcccttatcgcctctttcaatcataacaagctcttcgttgtccatcgggtttgaaagcgtttcgccaagccccgccattacgttgcggaaacggttgaccgcggcaacctctttgtccttgaacaaatcgctgccctttttgccgatttcattgtttccccactggtcgtcgagatttgcgcccgcgggacggctgaagaacagcggcgtgccgccgcttcttgcggcaatcagcgcccatgcccatttaatgtcctgctcgtcgagctgcgcccaggagccgtcattgcagtagttgtcgtgcgattccacccaggtcacaagcttgctttcatccacgccgctcgccgaataattcgaccagtttgcgatttcaagcgatttgttgatgattgcgctgcgcacctgcccgccataggaggacgccgtgacgctcatgattttggagtaatccttgatgcggtccgcgccgccctgcaggatttcaccgtactggaactgtgcgccgttatttaaaacaacagtccaaaagtcgctcgcgtaggatttgtcgtcgtcaggaagctctatgtgctttgccgcgtcatagcggaagcctgaagcgcccgcctcgatacaggatttcaagtatttcaggatgtattgctgtacgctcttatcctgcgtattgaggtcaatgagcccgagcaggttgccctgcgtcgcctcttccctgttgttatagttgcctacgccgccgttttgatggaacggctcatccgacaggttcagtacattttcagagattgcgttaaaatcactcgtcatatggttgacgaccgcgtcaacgataatcttaataccatatttatcagcctcagcgcacatttctttaaattccgcttccgtgccgagctggtagtttccaattacataatcggttggctggtaatggaaataccatttgcccttgtttgcgctgccgtccttgtcctgcagctgcatgccgccgttgtcgccgaccttgcattcgttgatgggcgaagtctggatggaggtatagccagcctgcgcgatgtccttcatattttcttttatagtattgaacgaccagcaccatgcatgcaggatcgcaccgtgctgtatgtcgtacgcaagctcatattcgccccgcgtagcgagctgactgccggactgcggctgcgtttcttcctctgacgcagtactgttttcagcggacggcgccttggaagctccggggccgtcgtatgaggaacacgccgttaccgagaacagaagcgcgcacgctaaaagcaaagctaatactctttttttcatatggtacattcctttcaggttggttgtctttttgaaaaaagctttcagtgcctaagtatagcaacaaaccggaaaatggtaaaggaaaacaaaacaaacaaaagaaagtttggcgtattccataaattagaagacatcaattattcaagatgaacaaaacaggttttcatcggcgaacgacaaaaagctccccgcgaaaacgcggggagctcctgtatcataggaaatcagacgatatacgaggggtcgaactcataggtgccgaatccgtaatgtccctgcgcgtcctgctctgatttatcgcagtaatagcccaggctgtcggacgcctctgacagcgggatatcctgtgtctgctggccttcgccgttgctaaaaatgatattgtcatattcgctcaggtctatggttatggagtaaatctcttccccgtagctgttcttgccgatagaggtgagctgttcgccgggccacgcctgattcatatgctcgtcagaggtgcgccatgcatacgcgtaaacattgccccaaaatacgctgttcgagaaataaagcgtgacgacctggctttccggattggtcggctgcgggtctgtcggctggggagcggttggctgtgtcggctctgggtctgtcggcaggggcgttgtcggagcctgtgtcgggtccgtcggagggacgtcgccgaaaactttgccgatttcaaagttcgtaggcatttttgcaagatatttctggatttcaaggatatcgaccaagtcgattttactattgcggtcaacgtcgccgataaaaatctgcctgtctgtcagacggattttcgccgcgagataattctgcataaccaagacgtccgcaagagaaatcgtccagtcgctgttgatgtcgccgagcatatagctttctccgggattcgtcgggtcactgccgggatccgtcggctttgtgtcaggatccgtcggttttgtgtcgggggttgtcgggggttcagtgccgtcgttataaacataaacgacgttctttgtgccgacaccccaattaccctgcggcgcgcccataaccagcaccggctcgccggcgccggatagcccctgggtggtgtaagaatcggaggtcgtgaccttcgtgccttcaatcaccttatcatccgcaagctttttaccagactggttgatgtagcttacgacaatctttgagttaaaggaggttccgccgtcctttacccaaacctcgccggtcgcttcgtagccgggtgcgttttgtccgggctcctgctgcgtgccggaagccttgccgtctgtaaacatcagcttagcctgcggtacatctacttccggataggtaaaccagccggcgcccatagaggaatcggccgtcatcttcgttccgggccatgcgccggtcaaaaggacaaggtcggtggaatcatcatatgcatagatataaggatttgcccagccattgccgttgtagtagtggaccttgagcttatcgtacgcggacgccttatatgtgtaggtgaccgtcgtatcggcggaaatcgtaccaaacgcgttgttcgggaacttcgtcgtatcgagctcatagccggcaatcgtctcatgctgctcgctgtaaggaacgccctgctttagcttctgtgtcttggcctgcataaggtccttacccgtaccgtcgacatatttgaccgtcagcgtatagctcgggatggaatcaggcgtatagtaataggtgaccgtcacgttatccgtcactgttccgctcgtaacgccctcggtctttacgaggttatagtcgaacaggatatcgctgtccggctgtgtcctgtaggtggtgccgacctcatagtcggagttgattgtcttgatgacctcgcccgtcttctggttgatgtgcttgaccgttacggtcttataggccgtttccggaatggtaaccttggcaaagctctccgcatcgacaagaaccatagcggaccttgcgggaacgcttactgttgagccggttgtgccgaggctcttggtgcctgcctgcgtgccgtttgcaacgattacccagctggagggaagcgcagcgccgctctgcaccttgagggtgagggtctttgcggaggtcgtgttgttggtcagtaccgctaccgtgccccattccttcgatgcgttcgccgtcttgttcagcatcgtgtagccaatggcgctgccgttttcgacaaaataagttgtatttccggaggccgtcgtcgggtcgcggaacggggaataattcgccctgatttccatcaggcccttataatagctgaccaagtcgctgtagcgctgtaccctcgtccagtcgatttggtttacgctgtcgggcgcgttatagctgtttccgtcgccatgcttcgtccttgcaaactcttcgcccgccagatagaacgggataccctgagaggtgaggacaatcgcggcggacagcctgttctgtgaaagcatggtgttgctcgtcgtgtcgtaattcgcaaggctgttggattttaaaatcttatcccaaagggtcaggttatcgtgcgctgagttgtatgtgacgcactgggagggctggcgcgaccatttgccccatgtggagcttgcgcctcccatcatacctgccttgatatcgcctgttacggttgtggagccttggatatagcccttcgtcgcgtcgtctgtgccgcccttgaggccgttcctgattttatcgctgaacatgccgacgcgctcgctcaccttggaagcattgtccattgtgcaggcctgggagcttgcgataccgttggaattccagtcggccatccacggctcgccgtatacgatgattctctggtcgattgcatcgagcgtagtcctgacctggttcatcgtcgtgatgtcgtggcagcccatcaggtcaaagcggaagccgtctatgtggtattcctccgcccagtacttgactgaatcggtgatgtacttgcggaacatcgtcttgtcggaagccgttacgtttccgcagcctgagccgtttaagaacgtgctgccgttcatcctgtaatagtagcccggaaccgtcttctcaaagctggaagccgtggaatacgtgtggttgtaaacaacgtccatgatgacgccgatacccctgtcgtgcagggcctgaaccatctgcttgaattccttaatcctgacctcgcctttgtacgggtctgtggaataggagccttccggaacattatagttgaccgggtcatagccccagttgtactgcggcttgttgagcttggtctcgtcaacggagccgtaatcgtacaccgggttcaagtgcacgtagttgacgccctgttttacgaggtaatccacgcaggtggaaatgtcgtccgtgccgttgacctttgtgccgctttccgtaaaggcaaggtatttgcctttatgcgcgtcgctgacgccggaagaactggagatagagaaatcgcgcacctgcacttcccagatgaccgcgtccgtctggtttttcacgagcttgtgggaatcgctgttccagccctcgggattggtcgtggaaaggtcgatgaccatcgaacgctcaccgttgacgcctgtcgcgacggaataaacgtcctgcgtctcgttcgttttgccgttcacggtaacaaggtatgtgtaatatgtaccgttcaagtcgccgttgattttgatggaccagacgccgttggagttatccttcgacatgtccttcgtctcgattaccgctgcgccggcctctgcgtcagagccggtcgtatagcgcttaatctgaacctttgaagcactcggcgcccataccttgaacgtcgttgcggcctttgtgtaggtcgcgcccaggtcgctgccgttgtaggtgctgtagggctccgtactgttcgtgtacgcgccagttgcttcgtctcctgtgacagccgcctgcgtgggcagtaccataacggaaatcgtcatgagcacacacaggaaagccgctaagagttttcttgctttcaaaaaatcctctcctttgttgcagttcaatggacgagttttacttcttacccaaaagcttttaaaaactcgtccattcttacttaaaattataacataacacaataaaaaggaacacacattttttccagatagatgaacaatctttccctgtttttttattgcaatgtgaataaaaaatggcatgtaaacgttttcaaagaaaggaaacaatacgaatggcccggtatatggtttttcataaaaaataggttaactaaaactatattttctgttcaaaaaactcccgctgcttgaaacacagcgggagcggcttcatggaaattaggccggattacgaaaaaaaacaatacggaatttcttcggtttttcaggtattgtgctggaataaagcgattccataacatccgaaaaggtaagcgtatcatcttcggacaaaacgacggccgtgctgtccttcggaggaattccgtctgcccccctgagcgtcagcaaatatgggtacggctccggcttttgtttgcctgcgctttcatcaaaaaggtaataagagccgttttgatggtataaatcaagaaaataaggcttggctttctcttcagaatagaactgcgcaatccgtatataggcgttctgtccatcctgtacgcttcgggtaaatttgttccatgcgtcccgatttttggagtcctccaaatcgagcattacataatagcccaagctgcccgcttcctccatcgtacagcttccgggcacgtcggaaaatccggtgtataagccctgcgcgtctgtcggggggtccatctgcccagcgccgcccgaacagcctgaaagcaagaaaagcaccaggatacacagataggccgcggcacgcttcatttataccgcctccttctttgaggtattattcagcagaaccattatgccataggttatggcgccagggagcagaattaccagcacgtcgcagggggaaaacggggtttgcaggaccgggctgaaaaaccatccgctgccaaaggaaaacagctttccgcacataagcagcagctcgccgcaatacatggcggctgtagcaagcaccgccgttacagcgggtaaagcaatggaaaacgacctcctttttccatataaaacacttccaaaataggttccggccgttacgccgagcacgacaaagaacaagcccgtcaaaaacgccgacagcggcgaaattgagagcgtcccgctgcggtaaaaggctgtcaggcacgcaagcacgcacagcccaataaaaacagaaatacagataagctgcactatcagcggcttttttcttgctttgtcgcctgttttaagcatatgggtaaagccgtaaagcaatatgacgaccgcggcgataattacaaccgcgataaaatagaagtgcgccttaaacgctggattgttttgtgcaaaggctggctcccctatcgcgcgcagagcctccggcgtcgcagcgcacaggctcatctgccaggagcttacaggcaaaaactccgtctcatacccggtaatgacctttatctgctcaaaaaacaactcccccgctataaaaacaaggacgctgaaaattgtcgccgtccaaagggaatgccgcttgaacacacggtaaaacagaggcataagcagcgcggctaaaataacagcgatgcacataggcgcgtaagggatgacatatttggggtagtcctccgctctgacagcgccctcagacatatagtagagcagcgtttttacacccatatatatcggataggcgctcgccgcgagaaccagaaaaagggaaagaaaataaaaggatatatatttacgtttcatgacgtcctccttatacggcggcgttggtcagcagcgcggcggcgaacaccgcaataaaaacggcgcagcaggccgcggaaaagacggtcatttttttgtatgacaaaatgctttcaacgcgcaccctcgttttcgcgccgccgaacgctgaggcaaacacggtttttttctcccggattccaatcagcgcatacgcgtaagcttttttctgtccgtccccgcatattttcagcaccttttcatcgcaggaaagctccatgtcggcaaaaaagcagcggaggaaaacccatgacagcgggttaaaccagtgaaggcacgccgtaacgacagccacacagcgcagcaggttgtcgcgccttttgatgtgtacctgctcatggagcagtacgtatctgcgcacctccccatcaagcccagccggcaggatgaccttcggcctgattacgccgtacacggcgggggcggtgatcttcggtgattcatacacgttgcccgacagcctgaccgcgtccctgatttccgcctttgtaatgaagtaaagcgctgccgaagcgagaaagagcgccgcgaatacaacaagccagactaggccggcaataaaaaacagctgcgcaatccgttcatccaggaaggtaaacggattataagtttcagcaagcgttatgctgttgagtattgttaaggaaccgctgtcaagcacaggcaccgaccttaacgtaaaccaggaaagcacgcgaaacaggctgaaattgcttgtaagcccgaacggcagccaaaaacgaagcagcggcaccatccaaaggacatacgggacaacccggggaatccgcctgattttgcgcagcagtaaaatcaaaagccccgcaagggacgcgctgatgctcatattgagcacccagtaaaagagctcgccaaccattggcctcaccgcttttctatcatttttttcagttcctcaagctcctcgccagtcaggccctcgtcctccaaaaaagcggagaaaaacgctttcttagagccgccgaacagccggttaatcagtgttttcgtctcttccctcgcaacgtcctgcctgcgaatcaaagaagcacactggaaagcgggctcgcttcgtttgaccgcgcccttttccaccaattttttaatgacggtataggtcgtatttttattccacccataagcctcctctgccaagaggctcagctccttggccgttgtgggctcctgcgcccagagcagctccataagcttaagctcgctttcaaacagtttgattttatccattggttccgcctccagactattctgttcgtctatatactatcacaatagtctacagttgtcaacccctttctttgacggaacccggcgcactttatcaggttgcgtttcatatactgataccacggcaaagccgcctattcatatcattttgcgctgcgggcggccgattctattatataagggagatttgctatgttttatgtgaaatcaaacgacggcgcgaagatagccgtttacgatttaaaaagaagaggctgcgacaaggccatcgtattagtgcacgggtggcctctgtcccacaaaatgttcgaataccagatacccgcgctgcttaaagcgggataccgcgtcgtaatgcccgacctgcgcggctttggcgagtcggacgcgacagcgtgcggttacgattacgaccagatggcgtccgacctgtactgcgtaatccaagcgctgggtttaaatcgctttgcgctgctgggcttttcgatgggcggggcaattgtaacaaggtatatggcgctttataagggctgcggcgtgtcaaagctctgcctgctcgacgccgccgtcccctcctacagcaagaccgcgcgcaacccgtatgggaacgccgtggacgacacaaacaaactcatcgcgctcggctgccgcgacaggcccgcgctcaacaagtacttcggcagtattttctttgagcagaagcattccgacgcgttcatggattggctgctgcatgtcagcaacagcgcttccggaatcggggaaatgaaatcgctcatatccctgcgcgacgagtgcctgtttgacgaccttgcccgtatacatgtgcctacaggtattttccatggccgggaggataaaatctgcccgttcggcatggcggaaatcatgcacgaaaatatccgcggctccaagcttttcccatttgaaaaagcagggcacggcgcgttttacgatgtgctcgagcagttcaactgtacgcttatacgctttcttgaaggggaatgctgaatactttagcgacataaaaagaggcgggagtttagctcccgcctctttcggctttttattatttgttactgcgcgtagccaagctcaaacgctttcaggttcatctcgacaaactttgccgggacagtttcctttatggtgtcgagccagacctgcttctcaaggccgagatgctttgccatcacaccgatgagcacaacgtttaccgcctttaccgaacccgcctcttccgcaagtgcaagcgcgtcggcctgcacgagcttaacgcccttatcggcaagcgcctccataatgccctgcgggtattcctttgcccctgtaatgactggcattggatcgattgtctgcgtgttcgaaataatagtcccgcccttctttaaatacggcaggaagcgcgccgtttcaagctgttcaaaggacaggatgtagtcggcctcgccctcctcgagaatcggggaatacaccttttcgccatagcgaacataggtgacgacggaaccgccgcgctggctcattccgtgtacctcagaaacctttacgtcattccccatgcgcagcatggcgttgcccagaaggcggctggcaagcagggtgccctgtccgccgacgccgacaatcaacactgattttacattgttatccataatttgtttccttcctttccgggcttactgctcaatggcgtgcttcgggcagaggccttcgcagatgccgcagccgacacattgggtatggtcgatttcagccttgccgtccttcatgctgatggcggggcagccgatgccgaagcacgccttgcagccgatgcatttttctttattgacggtaagcgcgggcttgtgcttaacatatttgagcagcgcgcacggacggcgcgaaataatgacggagggggcgtccgcctccagctcttctttgatgacggccatcgtctgcttcaaatcgtaggggtctacgacctgcaccctgtcgattccgacggaatggcagaggtcttccaggttgacggcaagcgccgggtcgcccttaatattatagccggtcgtcgggttctgctggtggcccgtcatgccggtaatggagttatccaggataatcacgacagagtttgtcgcgttgtacgcaatgtctatgagtccggtcacgccggaatgcatgaaggtggagtcgccgatgacagcgacagactttttctccgcctgcgcgccgcgcgccttattgtagccatgcagcgccgagacagatgcgcccatgcagacgcaggtatccatcatagaaagcggcgcggacgcgccgagcgtgtagcagccgatgtcgccgctgacataaaccttacattttttgagcgcgtagaacagcccgcggtgcgggcagccgcagcacatgaccggcgggcgcatggggatgtccatgtcgagcgcgtcgctctggggctcaacgcccaaaatatttttgcggacgatattctgtgaaaactcaccgcaaagtgagaatacctctttgccgattgggttcaaaccgattttccggcaatgcgtttcgataaagtcgtcgagctcttcgatgacgtagagcgtatcgaccttagcggcgaaatcctgtatcagcttaaccggcagcgggaacaccatgccaagctttaaataagaggcgttttcgccgagcgcttcttttgcgtactggtagctcatgccggaggtgattacgccgattttcgtgctgttcatctccacacggttgatgccggaggtttccgcgtattcggccaggtccctcgtgcgctgttccacaatcacatgctttttctttgccatcgcgggcagcatcacgtttttctgcgggtttttctcatagggctttaaatcgagctcctgccgctcccccagctctaccaggcttctggagtgggatacccttgtggtcaaacgcagcacgacaggcgtgtcgaactgctcgcttatttcgtaggcaagctttgcgtagtccttacattccgcggaatccgagggctcgagcattggtacctttgccgccatcgcgtaatggcgggagtcctgttcattctgcgaggaatgcatgccggggtcgtccgccacggcgagcaccataccgccgtttacgccgatatagctcatcgtaaagaacgggtccgccgcaacgtttaaaccgacgtgcttcatcgcgcagaaggaacgcgcgcccgcaaacgacgcgccggccgcgacctcagccgcaaccttttcattcggcgcccattcgcagtcgatttcatcgtatagcgccgtatattccgtaatttcggtactgggcgtaccgggatagctcgacgcaattttcacgccggcctcaaataatccccttgcaacggcttcattgccgagcatcagctttctcatacaatcagtccttatatgtatttcatctcttcacgggctccgcgaagttttgcaccttatctttattattttaccaaacaggccaactgaacacaagacataatttctgcaaagtcagttcccagcgtttctcaaatcgagaatgcgcttcgccttgccctgaaagcgctcaagcgttttcggctcgacgagcgtgaccttggtttcaagccccagaacgcttttaaggcggtcgtgtattttcttctggagcgcctcaagctcccggaaattgacaagcaggtcgccgtttatcagctcgaccttgacctccaggttatccttgaagttcgccctcctgacgattagctggtagtgcgggccgatggcttccatttcaagaagaacactttcaatttgtgttgggaacacgttaacgcccttgataatgagcatgtcgtccgtccggcccatggtcttttccatacgcgcgtgcgtccttccacaggcgcagggctcatatgtaagcttcgtaatatccttcgtgcggtagcgcagaacaggcattccctggcgggaaagcgtggtaacgacaagctcgccgacctcgttttcgcctaagacgccgcctgtgtctttattgataatctcaggaataaaatggtcttcggcaaaatgcatgccgcagcggtattcgcagtcgcccgaaacgccgggtcctccgatttccgtcaggccgtaattgtccgaaacgcggatttgcaggttctgttcaatctggctgcgcatttcgggcgtgcacggctcggagccgagaatcccaaggcgcagcttgtagtcggacatcgggtagccggaatccttgaccgcttcactcaggtacagtgcataagacggcgttgcgacaagccctgtcacgccaaaatcacggaacatcatcagctgcttttccgtgttccctgacgatgccggtataacggtcgcgccgattttttcaagcccgtaatgcagccccagcgctcctgtaaacaggccgtagccgaagcttatctggataatatcgtcttcggtcgcgccgcccgccaccgccacgcgcgcgacacagtccgaccatatatcgatgtcctgctttgtgtagacgccgacggtcggtttgccagtcgtaccggaggaggcgtggattctgacgatatccttcattggaaccgcgagcataccgaacgggtaattgtcgcggatatcgtccttcgtagtaaacgggatatactgaaggtctgaaagctgcctgatttttgagccgtcgagcacgccgcattcagtaagccttttatggtaaaacgggattttgttgtagcaataggaaaccatcgccttaagtttattgagctgcagcgcctcaatctgcgcgcgcggcatggtttcaatatccttttgaaacatgaaataaacactctccttatggcagccatacatcggcgcgccattgactttttcatcagccattcttattgttcttaaacgcatggaagcattgcatacggcaacccatatgcaatgctttgcgttttttatcctgcatgagaataacgttattttatattatatcataaaccgacagcgtttgcggtagaaaaaagcatcgcgaaattatgcagtgtgacgaatcagcgcgttttgagctcctttttgtagctgtcgtacacctcgtcaatctgcgcctgctttttatttttggtaaagaggctgacaagcgggacgagtacaagccccgcaatcattgcaattgcgccccagttgatgggggaagcgaggttcagcgggagtgatgccgccgccttcgtaagctcagggaaaaagccgaggttgaacaggaacatagacacaaccgtaataccaacaccgcagataaagctggcccagcacgcggtcttcgtgaccttgcgggaaaacagcccataaaggaacggcgcgaggaacgcgcccgcaagcgctccccaggaaatagacatcagcgtagtgatataagtgttcttattgagcgcgataatgaccgaaagcaggatgaacgcggcgataaagatgcgcatgatgaacacctttttcttttcgccggcctcttttcccctttttttcataaacggcagaatcatatcgatggtaagcgtcgagctcgatgtgagcaccagcgacgaaagcgtagacatggacgcggacagcacaagcacaacgacgatgccgaacagcagctcgggtaccgctttgttgaggagcgtcggcataatcatatcaaacacgggcttgcccgtttcggggcttgcgatttctcccgccgttgtaaagagcctgccaaaaccaccgataaaataggagccgcccgcaacgacgagcgcaaatattgtagagataaccgcgccgcgccggatggccggcttatccttgattgcgtagaatttatgtaccatctgcggcagcccccaggtaccgagcgacgtaaggataacgacgccgaacaggttgattgggtcaggcccgaacagggtattgagcgtattctgcggcacgcccgcgtcggaaatttgcccaaggccaagcagcgcgctcgaaataccgccctggttggaaagcacgcacacgacgacggccgcaattccgccgagcatgataatcccctggataaaatcgttgattgccgtcgccatatagccgccgaggattacataaacggctgtgagcaccgccatcacgacaatacagatggaataatcgatatggaacgcctgctcaaacaggcgtgacagtccgttgtaaacggaagcggtatacggaatcaggaaaacgaacacgatgagcgcggaggaaagcttgagcccgcgcgagacatagcgcttttcaaaatattccggcatagtagaaacattcaaatgctttgtcattacgcgcgtacggttgccgagcaccgcccacgcaagcaggctgccgattatggcgttcccaatgccaatccatgtagccgcgaggccgtaattccagccgaactggccggcatagccgatgaaaacaacagccgaaaagtatgacgtgccgtaagcaaacgccgtcatccacggcccgatgctcctgccgccaagcacaaattctgaaacgctgtttgtcttccttctgcaataaaaaccgataccgagcatcacacagacataaacaatcagcgtaatccacatgaccatagtaattccccctcttgctttaccgatttaaagcttttacctaatgaagtttaaaacgaggtttattataccttgaaaaccgaaataaatcaagtaagtaaatatgatttcgtcgaattgtcccagataatggaattgcttttgtggaaagcgtacagccctcccctggctgatactcaaataaaagcggcacaagcaaaaaaggaccggcattgcctgggcagctcacttctttcagcattgctggtgtttgccgcttaatcacaaagggttaaccggcggccagatggggcctatatgaacaaaaaagggggtacgggcggcatggcgctgcgttacgacataaaaaagccgtttgacttttgcacgcgctgatattagaatgatgccgggaacatgaacataataaatagaacttgaaacgggagtacatatatggataataattttgtgaatttaacacctgaaaatcttgcctccgagcatttatgctgtattatccgcagtaaaaagccccatccgggtgtagaggcaaaacggcaatggcttaccgaacgtcttagtgaaggccatgtattcaggaagctaaacgaaaaggccacggtttttattgaatatgcccctcttgaaacggcgtgggtacctgttaccggcagcaattattattatgtgtattgcctgtgggttttgggcgcttacaaaggaaaagggtatgggaaagcattgatggagtattgcctggcagacgccaaagcgaaaggaaaatccggtgtttgtatgctaggcgcaaaaaaacaaaagtcatggctttccgaccagtcatttgcgaaaaaatttggctttgaggtcgttgataccaccgataacggctatgagctgcttgcgctctcttttgatgggtcggcgccgatgttcacgaaaaatgcgaaaaagcaggagattgaagggcaagagctaacaatttattatgatatgcaatgcccttatattgagcgaactatcaagaaggtcaaacaatattgtaaggaaaacggcgttcccgtgtcttttattcacgttgatacgctgcaaaaggcgaaggaattgccctgcgttttcaataactgggctgtattttataaagggaagtttgagacagtaaatttattggacggcgcttccttaaaaagaattctcagattatgagcttacaagttatgttttacgggggtacctcgtttcgcttgattggtatacaaagcgtgccagcatacaggcaataaaaaagcagggagaaaagcgtcatgctcctctccctgctgaaacgtttgctcatactgctttgcgcatctgggctaatgattaataattggtggcgcggatgcggaaataggactgcggatgcgcgcagacgggacatacctccggcgccttcgtgccaattacgatatggccgcagttgccgcactcccaaacctgaacgccggcacgctcaaaaacttcgccttcgtttacgttcttaagcagcgcacggtaacggtcctcgtgctctttttcaattttggcaacctcagagaacaggtaagcgatatggtcaaagccctcttcctccgcttcctttgcaaaggtcgcatacatatcggtccactcgtaattctcgccctgcgcggcggattcgaggttttcagcggtcgtgccgatgccgtcaagcagcttaaaccaaatttttgcgtgctccttttcgttgtttgccgtttgctcaaagagctcggctatctgaacgtagccttcttttttagccttagacgcaaaatatgtatacttgtttctcgcctgcgactcccccgcaaaagcggtcagcagattggcttctgtttttgaaccttttaaatccatgtgaaaaaccccatttcttcgaaaaaattaaaattaagaatcattctcaatttatgtctctattatactttttatggcacaatttgtcaagaaaaaattccacttatttacataaagttcatacggttactgctcttttaaaagcgcctccagctcttccagggataataggcagttaagcatctcaagcatggcttttgtggacaggtattccggaagctcaagcctttggagcagctttccgcgcttttgcgcgctgttttcaccgccggaaagtccaagccggtaaaaatcctcacgcgtaatagagggaatgcgcattgcttccccttcgccgcattccgcgccgctttgccggatggcctttaaaagcgtctgctcgtccatgccctctacgccgagcgtcccttccttggagggggactgctttctcttttctttcccttgtataggaggaatataggcgttttttattgtttcaggcgggaccaggctttttaaatagttgcggattacaaagcccgcgccgtcgctgtcggtcaaaatgagcagcccccgcgtctgcgccagctttttgataaggctaaccttttctttgtcgcggaaaacgcggaatccattcgtctcaataatcggcgcgtctatcaatgcgctcagccgcattttatcgtattttccttcaacgactaccgcctgttttatcttaatcaccgggatactccttttttgaaatcatcagcagcttcgcaatcagctcctggagcagcagggcgttgtcgcgcggcgtgcttttcattagttcatccgtttcggccagaacagaaaggctgtcgcgcagcgcctgcgtcggcagcttctttgcgtagcgctccgcttggttcaggcggaattccttacgcttataatcatatattcccgcggcgtcctgcgccttcccgccgctttctatgacggcgcgcaccctgtacatatcaacataggtggaggaaagcaccgccaaaatactgataggctcctcccgctggtaaaacagctggtctaactgccggtaggcgttgtcgcagtcgcccgttaccacgtatttcgacaaatcgaacacgcgcgcttcaaaatttttgacgacggcctgctcgattgcctcccgtgtaatttccccgttgtccgtaaaggcacagagcttatcaagctcattgcgcaggttctgtaaatccgtcccgcaataggaaacaatgcgcccggcatccgcctggttgagcgccgcaccgcgcttgagcgcccaggtaacaagctgcttttggagcgcaatctcccccattttgttgagctgtacggcgttgccaagcttcgtcagggcggcaagcagctttttgtttttggctttgcccatatccgggttggcggtaagctgcgctacgacgaccgccgtgtcctggggaatgttttccagcagctccatgagctttgaaaactctccgtccgaaagcttagaagcgtccgcgtccgcaatgccgacaaaattccgtccgcccataaacgggacggctccagttgcgaccgcgatttggtcgatattatcgagcgtacggaacgtatggaaggaaaaatcggacgggtgcttccccgcgattttttccaccagcttgtcataatacagcttgattaaaaacttttcattcccgtacaggtaatagagctgtccgggcgcatcttccttaatcgcctttttcagctcggcttccgtaaggctggccatattgtcactccccctcagggcttatatagttgaatcaaagtgtccccgtttaccgccggggccgtcaggcgctcctggtacggggcaagcagctgcgcaattacaggcgctttttcatcactgcttgaaattacagtacaccccgcgtttaaaaattcaatatgctcaggcgggtcagatacaaggcagatatcggctttacgccatgccgcgggaatatccgcaaagcttcctccgtccgggcagacaagcaggctcctctgttttgtttgcacgaacgtccagacattgccgccgtaagctgccgtttcaagcttaacgtcgccccatagcaggacgcgcctgctgtcatgaaagctatcaatccgcccgttaatttccgtaaggtcttccttgagcgtttcgttgctgcttgtatcatataacaaaatgttttccacgtcaatttcatttgtcaaatccgcagcgtagcttttgagccttttccccgaggtaatcagcataaaatcgaccgggtccgatttttcttcataataccggaaaaggggcggattgtaccggttcccaccgcaggcgagcagcgctgtttttccgtttttttcaagcacggcacaaatcccgtcccccgcgtcgaacacgcgcaaattcacggcgttccactgaaaagcagtatacgtcgcgcagccgcacagcagcaccaaaagcgacaggggaacgatgagcttgaccgggcgaaacccccgcttactcaaaatacccaccgcaatcatcagcagcgttgcggcaaaccaaaggtttaaaaatttctggtctatgctgatatatgcatagggaagctttgcaataaacacggcggtttgtatcatataggcgctaatacacgtggcggcaaacgcgaacgggaaagccaaaaacgacagcggcccggcaaagctcagcagcaccatcggcaggcagcagcataaaagaagctgcgccgcccagacaagcagcaggtttgacagcaaaaaataaagagaaaaagaggcaaacgcatagagcataaccgggaaggccgccacagtcgcgcttaaggaaacgagcaggacagaaagtacaaaatgtacggctttcctgccaaagcggagcttttcaagcttgccgcatatgtaaccatccatcgccgggaaaaacaggataataccgagcgtagcgcaaaacgacatcaaaaaaccaatctcccccgccgcaaacggattgaaagccgtcaggacgagcgcagcaattccgatggaattgagggaatcgcttgtccggttgaagagctgcgccagcatataaacaatcagcataataccggagcgcatgacggacggcgtaaacgcggtcagcgccataaagaggaggattccaacaatcgagacagccgcggcaagctttttcctgcgcgtaagcttgaacaggataaagtaaacgcagccctccacaacggccatatgcagccccgaaaccacaatcaggtgccctgttccggattgattgaaatcctccttcaaattttggtcgaggcagtatttatcccccagtaaaagggcgctggcaagggacgcttcctctgacggcatataggtatagattttgccggtgacggccttccttgcgcagagcgcgtaatagtagggcggtttttcctgcgtttccctgaccgaaactttcccgccctgctgtactgccgccagcaaatagataccttttgccatgtacctgccggagcttccggccgccggctggtaaaaatccgcctcgcaggttacctcgtcgtaaaagtccgcgtcgatggggtttgacgatgacaggagtattttgattttctgcggtacgtccggcagctctattttgctcgtctcaagctcataataaaaacggccgtaccgctcataaggcgcttctgaaattacgcctgtaaccctgccggctttgccgtccagcgcctgtacaggcacaacccacatttgcacggcgagaaggtaaagaacaaaagcggcgcacgccgtaataagcgcggcagggaccgttttttcctttctcagcttagaaaaaaagagggaaacggcaaagcccgccgcaaaagcgcatgccaggacagcgcccgcgcgcgcaccgaatacagaggccgacgcaagcgccgctaaaaacgtaattccgattacagcaaacgggcgtttcaatcctatcccccctctaaatataaaagaggcgggatagctcccgcccctcgccgtgtacgaaattcacattccgccacggctgtcttctattgattttgaaagaaaagcggaagcggttccagaaaaacaatatcgcttcgttttgccgcgtccccctcagcaagcacacaggctttacctgcgatttgtccgcccgccatttccactaggcgctccagcgcgtttaccgcctcgcccgtgcttatcacgtcgtcaacaatgagcacacgcttattttcaagctgccgcgcgtcctcgcccgagaggtaaagctgctggacgttttccgtcgtgattgttttgaccggaacagaaaccgaattcgtcatataaagctttaaacccttgcgcgcagccacatagcggcctttttcctgccgcgccatctcataggcaagcggaatccccttggcctccgccgtcaggattatatcgtgcgccgggcagcgcttaagaagcgcttcggccgttttctccgtgatttccacatcgccgaacataataaaagcggctatgctcatgttttcattgacagggcagagctttaagctgcgctcacacccggcaattttcattttataatacccatccatacctttaaagccatcctttttatttcagtcataccatcctggtattgagctttttaccgccgagcagatggaaatgcaggtgatgcacggtctgcccgccgtcttctccgcagttatttacaatacggtagccgttttcaagccccagctcctttgcgattttagggataactgcataaatatgcgaaataacccgggtgttttcttccgtcaagtcgtcggcgcttcctatatgctcctttgggataaacaggacatgcaccggcgcctgcggctccaggtcataaatagcaagaatctggccgtcctcatatacctttttggaaggaatctccccatctacaattttacaaaacacgcaatccatttattatcaatcctttcttcctcaggctgccatctttattttaacacaggaaaaaaggttcgtaaaggtttttattgtcactattgccttatcatggtatactgtataaaaacagagcagaaatactgtcggccgcactgcatttacaagagatgttttttacagtttgtatattaattactaattgtatatttttttgcttgttcggcagtaatcggcagtaaaataaaaaggatgaatggaaaggaatgaaccgtatggaaaacaactcccctaaagggaagggaaaagaacaggacgtatttcggcgctttttagagtaccagccagccgaatatatttttgccgcgtttgcggcggctttttgcggcgcaagcgcgttaagcctctttatgtcgggcggccagccatttactgaacttacgttttcaggagccctgtcgcagccggctttcctgattacgctgattcttattttcgcgctcctgctctttatatcccaggccgtcaggagcaaacaggttacgcccgcggcactgctggctttttccgtgctttacggcggcacgcttgctttttataacgcagacaacatttactttaacatcggcattgcgtttgtactgtttttaattgtcgcctgggtgatgaagggcgataaaatcggcttgcaaaacatcaggctttcaaaaaaatccgtttggattttcgcgggcgtgggcgcggccgcttttacggcaatcgtggccgcggtttgtatcgcgcgctatcaggcatatgtagcgcatacctttgattttggtatttttacgcagatgtttgaaaacatgcgtacaaccggaatgccggataccaccgtagagcgaaatgtgctgatgtcccattttggcgtccatttttcgcctatctattatgtacttctccccttctatatgattgtcccccgtcccgaaaccctgcttgtccttcaggcggcggctgtcgcaggcggcgtttttgcggtcgtattaatctgtaaaaagctgggcttatccaaaaatatgaccgtaatgttctcttttatctatctgctctttccgagccttgcaaacggctgcctctacgatttccacgaaaacaagtttttaactgtccttctcctctggaccgtctacttcatgctcgctaagcgtaccgctctgatgtttgtttttgcggcgctgacgctgatggtcaaggaagacgccgcgatttacatagcggcgctcgccctatatctgctgttttcacgcaaggaatattggaagggggctgttatgctggtcgcgggcgcattttattttgtgtttgccgccagcatggtttccgcgttcaatgtacttggggaaggcgtcatgttaggccgtcttgaaaattatatcccacagggcggcagcgggttcctttccgtggtgcaaacctgctttttcaactttggttactttatatcacaggtgtttactgcagacaaaatcatgttcattgtttggatgctgctgcctgttgcgtttgccccctttatgaaccgcaaaaaatcaatcctgctgcttttcattcccatgcttgttgtggatttgatgtctaactggcagtatcagtatgatattgacttccagtacacctttggcgcagccgctctggttattgtaatggccgccttagctgttgccgggatgaaacgtgaaaagcgccagactatcgttgttctttctgccgccctgtgcgttgtaatgacgttctctctgaccgtaccgcgcatgaagacctttctctcctacgaggccgccaacaggacggctgtaaaagggtataacgagttaatcgcggagcttccaaaggatgccgagataacagctaacgggttctttgtcccacacatgtatgattttaagaacctttacaattacccgaacctgtatggcgcaacaaagaaaacgcagtatctcctcgtttcctccgttgacgtagccagcaataaagacgggctgaaaacttttattgggaccgattatgagctggttaagtcctctggcaatatgcagctttatgaaatgaaataaactttatatcctaaaagggcggggcacattttatgccccgccctttttattaaaaattgtaacttaattttcttttttagactttgccgtgattttcttttctgtcccatttataatacgcttgatgttttccctatgtttaataaatacgaccagccctacgccgaacgaaaaagccgtaccgaatatgacataaagtatggtacgcggctgcgcagtttcaagacttggtaaatagtccagaaaataagtaaagcagaaggtgaaaatcgggtaaaaaaccgcgcttacaagcgaagcctcagagataatcttcgtaatcaggaagacaatcaggaatacggcgattaccgctaaaaatacgcgccagtcggctacaagcatcagcgcggccgctgtaacgacgccctttccgcccttaaatccaaagtacaccggaaacatatggccgaggatacagcagaagccggcaatatatttcccgtagctgaccagctcctccgctggcgccgcgttctgcacaatcgtggaaaaaatcagcccgccgagcgctaccgcaagcacaccctttaaaaagtcgaatacaatcgtaaataccgcagggcccttgcccaccgaacgcagcacgttcgtaaagcccgcgtttccgctgcccattttgcggatatccgcgttttgggccaccttttttgtaataatgatggaaaagctgatgcttccaagcagataagcgacaagcattgttgagaggatttgcagccagctgcctgacagcacggaaagaaccgtatcagccatatcgtaccattcctttcaaaataaaaggttatctatatttatttgtcgccgcgttcccttatgacaaagcgcacaggcgtaccctgcagctcaaaggtttcccggatacggttttccagataccgctgataggaaaaatggaacagctcggcggaattgacaaagcaaacaaatgtaggcggctttgtggacgcctgcgtcatgtaaaaaattttcaggcgcttccccttatcggacggcggctgcaccctggcggtcgcctgagcgagcaggtcgtttaacaaaccggtcttgatgcgcatagcgttcgagtttgccgtatgcttaatcatctcaaaaagccggtcgagccgctgccctgttttggccgaaataaaaaccatcggcgcgtaggacataaacgaaaaatcggtttcgagctttttacggtactcgttcatcgttttatcgttcttttccacagcgtcccatttgttgacagcaataatgcacgccttgcccgcctcgtgcgcaaggccggctattttggagtcctggtcggtaaagccgtcgaccgcatttatcattataacacaaacgtcgctgcggtcaatcgccattttcgcgcggataacactgtatttttcaatcgcgtcgtccaccttgtttttgcgcctgagccccgccgtatcggtcaggataaaacggccgtactggttttccacctccgtatcgatggaatctctcgtcgtacccgccacatcggaaacgatacagcggttctctcccactatcttattgaccaatgaggattttccaacattcggcctgccgataacggcgacgcttatgatttcgccgtcctcttcgtcgcccgcctgttccggcaggtgggaaaacaccacttcgagtaaatcgcccgtgccatggccgtgaacggaggaaacctggattgggtcgccaaggccgaggttgtaaaactcataaaaatccgcgtcaggctcgcccaccctgtcgcacttgttgacgcagagcacaaccggcctgccgctcttttgcagcatggacgcgacctccatatcggtcgcgacaagccccgcccttacatcagtgacaaggataatcacatcagccgcgtcgatggcaagctgcgcctgtgtacgcatctgggaaaggatgatgtcgtccgaatacggttcgattccgcccgtatcgacgagcgtagccgtacggttctgccactctacctctccgaaaattctgtcgcgcgtaactccgggtgtgtcgtccacaatggaaatacgcctgcctgtcagcttattgaaaagcgtggattttcccacgtttggcctgcctacaatcgcaattaccggtcttgccataagtcactcctccttttttcttcctaaaatcgcacggaacagggcttccccgtcgtttggtaccggggtcagcttaacagcgagcgcctgctctgcttcctgtgtggatacgtcgtcgaggaaaatgtctccctcacgcctgagcatgacgcttggtatcagcagcgcgtcgcccaaatccctgcctttgagctgtgcaatcaggtcgccgcctgtcacaagcccgctgacattgacgccaccgccgaaaaagtcgttgcggatacccacgacctcaataaatacgccggggtatttatcacgcatttgggacaataatgcacgcaaaaacggcgcggccgaagtcccgcttgcaaccgtaaccttacgtttgagcgttttatcgccctgctcaagtgagagcgcgccttccaactcgtccttcataagcgcgagcagccccacaccgttttccagctggtcaaaatcctcgtaaaattcggccggcggaatctccctgcccgcctttaaataaaactcatcggctgcaaacacgatgcggcttccgtgctccttcacgcacctgtcgccaaactgttcgataagcgcgagcgtctgcgccgctgtttccctggtataagggataagcgggtacagcccctcgcggtatcgcgtcagtccaacggggacaaccgcgatacactcgaccgacgggtacagcgcctccatatccgtaaggctgcgcagaagctcctccccgtcgtttattccgggacaggatacaatctggcagttgagcttgatgcccgcccgggccaagcgctgcataatggaaagcgcgctgccggcaaagcggtttttcatcatcttcacgcgcaattccggattggtggtatggacagatacgttaatcgggctgatgtgcatcttgataatacgctcaatttcgtgctcgcttaaattcgtaagcgtaatgtaattgccaaacaggaaggaaaggcgggaatcgtcgtccttaaaataaagagatttacgcatccccttcggcagctggtcaacaaagcagaaaatacactggtttttgcaggattgctgcttgtccatgagatatgtctcaaaggttaggccgatttcctcatattcacgttttttaatcgggatggcacgcgtttttccgtctgttccctgaagctccagcataagctcacggttcgtctggtaaaagcggtaatctagcacgtccataatatcgtttccattgatggacagcaaagtttcgcccggcaggataccctgccgcgccgccgcgctgcctttcgtaaccgattgtatgataaccgccaacctgaccacctcagccgaaaaaaaatagagaaggatcagctcctcctctatcttcgggaaaattcaaagaaattatgcttcctttttaataacttccctgccgttgtagaaaccgcagttcgagcagactctgtgagccgtcttatactcgccgcagttcgggcacttcatcagcgcgggagctgaaatcttccaaacattggaacgtcttttattctgtcttgcgcttgaggttttcctcttcggtactgccatgaccggcacctccttgtacaatactatggggaatacatggtgcgtattctaattcatcaagtctttgagcgcctctaaacgagggtcaatcctgtgtttgccgcaatcacacgctgtttcgttgagatccgccccgcagtccgggcacagccccttgcaatcgggcttgcacagatgcttcgacggaagctccagcagaatatcggctgtcgcaagctcgtccaggtcgagcttgtaatcgggcgtttcaacataatcgtcgctgctgctgccgcttagggaaacgacaagcgtatgctcaaactggaaagacatatcgcgtgccgtatcggccgcacagcggtcacagggacgccggtatacaaaagcggcgcttatgcgcagcctgacaatccccgctctgttttgcgcctgcgccctgagcctcacaggttcgggcacgggactggttccatccaatattattttgctcaaatcgagcgtgccgtcaacttccttatttgcgccttctgttagaaagacctcttttaaatcaagaagcatgtcgcacctctttttaagcagaacaaaattgcggtatcctaaaacactggttaatattatatcgttggggcgtttgtttgtcaataggattccgctgttttcttaaaaaaggctgtaggattacaatacatatagggctgtaagaagggaaaagagtttactactctggaaacaggcttttttgaatgatgttgcccattcgggcaatgatgtgtcccgcgggacataggggcaaacattacatcatgccgcagcgaagcgacggcacatcattttgcaaagcaatccatcatttcgccgtaaggcggcacatcatgaaaaatccatttttctgctttcaaccatttctgcttatcctgttcaacttcaacatgtttgacaaacctacagttcttctgttttcttaaaaagggagcgttgtgccgcattgttccttaaaagtcggctgcacggcttcgcgggagggccggcatacctaaattcctgcgcggaaaacgattttttattcttccccggtaaagccagattcggccggttcaccgctgagtacaccatttttccagtgcaggggcgcgccgaaccagcagcagtctttttcacccaaatagactttgtaaaattgacggattatatatcgccttatccccgccgttccagaaagcaatagctcttacaaaaggaagcccctatgtaattattttctacataggggccctttttctatcgaatgtttttactggttatgtcccattacagggacgtctgtctttatattcaattacgccgcgtccggaagctgtgcaatcatgcccgcgaacagcttctggaggatgagcgcgtcctgtaccgtaacggagccgtcaaggtccgcgtcggcatttttcagcgccgtacccgtaagcagatggtattttgccagatgcttctggatggcgaggacatcctggagattgagcacgccgtccggattggcgtcgccctgcatgtacagcggctctccgctgtaggactgccacgcgccgccgtagcagtaggcctctttctggtcgtcataatgcttggttgctgtatcaggggtaaataggttgctgccgtcctgcgccatcaggtcgatcgactgttcctttccagcccgttcaggcaagctgttattaaagataacatagctgacgtccgccgggaaggtgaagctgaacaacccgttcccctcgtccttcattaatttgcccggccaggagcaggaggtcttgctgttccaccagaaggcgtacacctcttcccaattcgttcctgagttatcgaaataaagctttacgcccgcaatctccttcatcgctgttatcgcggcggttttcgcatcgacgacagcagcggctgtcttggcgctttcaatatttgtaaggccgtcgtcctttgcctttacgattttatcccaatcggcggcgctgtagtccgcgctgttatacgtttcaaagaattcgataagctcccgcttcgtctgttcctttaagtcgtcgaggcttgcaaacgcgctgtccatgaaataatagcggccctccgcccagtttatcatatatgcaatctgcttgtcgtgcgtttcgccggctgccggaaccagtaggttatcggtgaggtcccagcggatatagttcattacggaggcgtccttcgtaagctccttgtacgtatcaaagctcttgagccgtcctgtcccttccgttttgccgaaggctacatcgaacgcggggacaaattcctcacgccatatcttagccgcaagctcgttaaaatcgtcgtgcctgcacagcgcgccgaatatcgtgtacgtattgcgcgtgttgctcagctttgaaatgctcgcgaagaacttcgtgtaatcggtcatttttacaccgtccttcgaattgagcaggtttccatacgcgatatcaaaatcccacgccggggaaatatgcagcttgccgtcgccctttgcgtccgattccttataaaggaacgtgctcgaaataccgcagtccatattcatggcaagctcctggataaggtacattttcgccgcgtcctgcgcgtcaatgtagtccgtataatgcttaccctttgagttgtagcccgtgctggaataaatcgcgtcctccatatcctgtataaagtcggcgatatagttaacctgcgccttcgaggcatattcaggcgcgcgcaaatcaacgttctgattgcgcgaggtcacaaagccggaggcttccgccacgccatacacgtattccacgagatagccgcctgtaatgtcgtccgggtcgttcgggatattataaccgcgcctgctgttcgccctgccgaacgtgccggaattatactggctgtaggagcttaaatcaacagagtcgctgcctgtcgccgccataacggcttcctcggtttttccttccaaatcctcaattttcacaagattgtcggaaccgacgtcaaccttctcagaaagctggtaggtacccagatattcgccgtttgcgtaaaggtcgaggaagcgtgattccggtgcaaacggcaggccgacctcgtcagccatgtcgtaggtaaaacggttgcgtatcatggaatgctcctgcccgtttgcaagcaggcaccattttttgctctttgccatacccatcagcgccgttttcttggcaagcttgatgttatacggcttcttttcaatattggtccaggtcgtattgcccctgcccttaatctggtcaagcttgccgtcgtagcttatgctgccgtccgtatcaattaaaagcaggctgccggattccttgttttccttattggcgtggatatagtccatgcttccgctctcggtcgtcaaaaacatcgagccgatgcgcgaggactgcaaaaccttaacgctgtactgcttaccgtcagcgcgcagggtatagctgccgccattttcaaacaggctgtaaggcttgccgctttcaagcgttgccgcgccgatttgcacgctgtcaaaattatgatataccgtgatgctgcttaagtcagcggatgtcgggagcaggaaataataaatcccgtcgccgtcgaggtaccatttgaccgcgtcgataccggaggtcccgtctgccggacacgcatccatccagacagccttctccgcgctgttttgaatataagaggggagctccgtattctgcgtatcggcggcgaaggccacagccataccgccgagcgccagaagcagggaaagcagcagcgcaagcgctatgtttcccctttgtaccatatgtttcatttcaattccatcctttcctttgccagggtgtgattttcttatctatcatcataccataaaaggcagtcataaatccattgggaggatatgacaaatgccgtcaggaaaagtaggcacaatgacaaaaaggacaggaaaacaaacagaaagccttccgccgtataaaagagggcggaaggcttttccatatttaaatttttttcaccgggaacgcaatgcgcgcgcccgtttccatctgtgcgccgaagttaaaggaaggcgcgttttcaaagtcgtatgcgtacccgaaccgtccagggtcgtagccttcatacgcgcggaatgtttcttcaatcgctatgcagaaatcctcttccctttcaaacggtccgctctcaaagtaaaggaggtttccttttggaagcttcgccgtaaggtatccccacgggatttccccttgatagcctgcgggaagctcaattcccgcggcagtatccgaatagccctccggcaccagcgattttggaagcgttacaattgcagccgtgtccagcttttcttcaaagctgttaagcaggccctcccactcgcagcccatttcctcacagaagctcatataatcctccgcggatttcgatgggagaaaaacaagcgtcctttcttctcttgaaacgacagtagctgtgcagaccggcatgcttttttctttgtccgtcattctgaattcctcatttcgtaaaaaatattggtggtcggcaggatatgcgataaaaagcgggacgggcggtttttgcgtccggtactggtatggcgctactccaaacgcgctgcgaaacgccctggtaaagccctcgtgcgattgaaattggtgcgacagcgcgatgtcgagtacattatcagaagaagtccgcagcttatccgcggcgtctgtcaggcggagcaggcggatatattccccgaccggttttcccgtcatccgggcaaaaagccgtttacagtggcgttcactgtagccgagcgccgccgctattccagaaatgttaagcgactcatcgttaatatgcgctttgatataatcctgcattttccgcacgagcaatgcctgttcccggtctttttccatgccgttcaccttctttatcttaccaaactggaattctgttttcttgacttgttgggacagatttctcaagcaactatttctttgcgccgtttcagaaaatttcttttgaggaaacggtaaatttccgatatgagcacaaccgtgaaggaaagcccgataattttaatccacatcataagcggaagcggcacggtaccgaacacagcgccgccgaattgtgttatcagaacctgcaatccaaacgtgagcgcgaacacaccgagcatcagcttgttgccgccgatgtttttaaaaatgctttcatcgctcaggacgcggctgttgaaggcgttgaagagctggaacactgcaaaaagcgtaaataaaatcgtaggaagctgctgcggcgttccgcccaggaaattcgtgaaatgctggagcataaacacgacagagataaacaggccgtttaccacaatgcgccccatcatgctttttgtaacaatacttgcgccgcgcggcgtgggcttacggtccatcagcttttttcccgccggctcaagccccagggtaagggcgggcgggccgtccataataatattaatccataacagctcaagcgcggaaaagggcgccgcaaagcctgctaaaatcgaggccaggacaactacaacggatgacaggtttaccgtaagctggaactggataaagcgctggaaattatcgtaaatccccctgccccactggaccgctttaacgattgtggagaaggaatcgtcaagcaatacgatatcgcttgcttctttggaaacctccgtcccggagatacccatcgcgattccgacatccgcgtttttgatggcgggcgcgtcgtttataccgtcgcctgtgacggcaacgacgttgccgcacgctttcagggcgtttaccacgcgcatttttattaccggcgtactgcgcgcaatgacgcggatttcaggtaagcgttttttgagcgcttcgtctgaaagtggttcgagctccctggcctcgaccgctatatggttctcatcgaggataccaagttcctgtgcgattgcctcagccgtaacgatgttgtcgcctgtaagcatttttatatcgattcccgcgctccggcagcggctgacggcctcataaacttctttgcgcagcgggtcggtaatcgcgacaaagccgtcgaactgcatctggcattcaatatcttcacgatgccctttgaaatccgaaataccttccacctctttgtgcgcaaaggcaaggacgcggcaggttttctcctggaaacggatgatttccttctgcacacgctccttttctgccgcgttcatggagcacatcgcgataatcttctccgggctgcccttggtataagcgacggcagagccgttttcgtctattatggtcgtcatgttcttcgtttctgatgaaaacggaaaacagcaaagtgtttttacggcgccgcgctctcgtttatagtctcgtccggccagatgcgccgccgtaatcagcgcgcattctgtagggttcccgacaaaatcgggcacgccgttgtcaaagcttacatccgccgtactgttgacgcaaaaatttgtgagcatcgccccgctttggagcttctgcggcttgcacagcgcgccatttgcgtaaacatccacgaccgtcatacggttttctgtaagcgttcccgttttgtccgaacagataacgttgacgctgcccgccgtctcgcaggcaatcatttttttgaccagcgcgttctgtttagacattttaattatattgatggcaagggaaacagccatgatggtcggcaggccctccggtacagccgcgacaatcaggacaatgctggaaatgaacgcctcggaaattgtatcgaaactcgcggtaccgttcgataaaaaagtgaacagctgaatgacaaacacgacagctgccgcggcaacgccgaggattgcaatccgtttgcccagctttgccattttttcctgcatcggcgtggagcttttttccgtagaggataactctttcgcgattttcccgaactccgtgcggtcgccgacgtctgtaacaaccattttgccgctgccgcctgtaataaagcagccggaataaagcatgttggcacgctcggcgaccggcgtgctttcgctgttaaaaaccgcaagcgcgtcttttttgacaggtgcgctttcacctgtgagcgcagattcatccgccattaaccctgtgctttcaagcagcctgccgtccgcagggagcttgtcacccgttgctatgacaacgatgtcgccgaccacaatgtccttctgttcgattatctgcgtttttccatcacgcacggcctttaccaatgtctcgtcgcctagcctgctcagctcctcaaaggcttttgcgctgcgcccctccattgccaccgtaatgacgacggatagggcgattgcggccaggatacccacacattcgataaaatccgcttttccgcccgtgaactgcctgacgaggttcacgccaaacgcaatggcgtccgccaggattagcatgataatcataggctcgcatgcggcctcccacaaacgccgccacagtgacaccttttttgccctggtaaaactgtttgctccgtactttttcctgttttcctctgcctgtgcgcaggtaagccctgtttcccggtcgacagacagagcttcgagcacctcgatgcctttcttcagataggcgttcataaacattccccctgtaaggattttcgcaataaaaagacccaggcatggctttcgctatacctgggtaaaccgtttcattacgcagaccatgtatagccaaagcaggcatacatgagtctggttatttaagacaagccagaccgtttccggccaggatgttgacttgccacgcacaatcgcgctaactactccctcatgggtattttaaattgcagtgctattatagcccatacttgcattactgtcaagcttttcctgttagcggccgataaaaggccgggcgccaagtaggccgtcagcccattaccgctataagggattgaagaagattcacgtctaataaattgatattaccgtcgttgttcatatcggcaagatacttctggctttcgtccaggatgacagccttgccgatataattctgcagcaataaaacgtcgcttgtgcctatcgtcccatcaaggttcacatcaccccgctggtacccaactggctcaaaataccattgcagcctgtctggaaagcctgcatatgaccaaattgccggactgcttgactgctgagtattctgcacagtaagcaggctttccgttccgggcgtgacagagtcggcaagcttgatgccatacgcattgtcaagtccatttgcaaaatagtatatagatgggctgcccgtttcatttataacgacctgatttccacttcccgctttggtcaggcttccagaaacaacagaggagtttgttttgattgtaaacgggtttgttccttttttgctggaaatccattgctggttcctcgctccattaaagggtgcctgtttcacctgtccagtggattcgtcaaccgtaagatatgaaccgctttgcctgtgacggatataataaatcccctcgggatagtcggttccagtgaggttttcaccaaaggtcattttgtctgtactccaagcgtaaccgaaacgcactgtctcggtattggctgtatcgtatttactgaccttgatttggtactgcattccttgtcctgtaagcaacgggaaatacgtcatttctgttgaactattggaattcgtagaagaaccaacaactgagccgttccgatatacacgcaagtcgaggtcatgtaacgtgccgaccgatgcgcttccgccagcatggtttgaagtggaaacagtattatctatcaaccatgcaatactgacattcatataagaggcaccgtaatatggctggataaaatttctagtttcctgcgaaccggatatttccccatagccatattgccgccgcgaaataatgctgattgcgttccacgcgtcaaccgctcccgcgccctgtttatttgtaagaccctgccccatgctttccgctggagtagaaattacttttctttgacaagacgccaataaaattgccttcagaacctgcggctgatactccaatgacggtttcaattgcagcaacagtgcggcaataccggtaacaacaggtgcggagctacttgtaccacctccgagaatattagctggcgcaaccacatcgggctttaagcagccgtcaccattgtcatagctatacgcaaaaagagtatcgtcatcttttgaagcagtctctttgtcgttatatccgccaattgcaagtgtgttataagccatcgcaggtgataaaattttttgatctgcataattgcccgctgaacatatcattaggatattatgctgattagagatgtggtctatccacctgtcttcgttattataatatgtatttcctgtaccggaaaaccaggaactcatatttattaccttaactccctggtcgattaacgtttctaaatttgcataagaaaagctatcattataaggttgtccgcttgcagcaaaaagagtaatttccggcgccataccgcttttgcttcccattataattgccgctgtgttgactgcatgcccaccaggcgacggactgtttccaactatggtaatgtcagaaagattatattcgcttgacgattgcgggactgcctgttcaaacattccaacctttacgtttttaccagttaatgctgttgtttggtaaacacgatttaaaccaatcgtttctttaatcgagtttggcgtacagtcctgcattgtaatttcttcacataaagaaactgattctatttttttgttacaatttatttcgttgatttctgaaactgtcctttccacaataatggctggcgagtatcggctggtaaaaatgatatcattttcatcaatatttaactcttcgatgatagaagcgcctttttccatatatttttctctggaaatttcacgtcttgacataatataataatcggcacgctgcgcttcaatctgtcttgccacggtggtccgtgaaagataagcttgcatttgttcttgacttccagggacttcattctctaaattattaattaaggttggatccggcatgctgaaatcaactgccaggctctccgctgtcagaccagtctgaatttccgtttcgttgtccacctgcgcctggtcgatatcccggtaccaaatccaaactgggattttatgaccggataaatctgaattctgctgtttcagcttctttatttccgttgatagggaatcggatatcttgtcttcgggaaccattatattcttttccactgcaaaagcactgaccttgagcatggtacagcataaaaccagcataagagaactcgctaaaatttttattgcactccttttcatacaaatcatccctctccacatttctacaatacatttttcttaaatcatccttttgttacttttgcaataaggttctgcattcccaaaacgtccgctacgttaatcactttgtttccatcgaaatcgcaaaaattaaacgtactgacatatggttccatttgttctatctttgctattactttttgcacatagagtacgtcactaaccgagacggcgccgtccatattaatatcccccggtgaataaacctcagggaaagatttttcgtgcggctcgttacaccacgcagcgatttcgtccaggtcgattaattccttttcatacgcctcgctaagcggcactacctctccgtctttttccgcataaatcccgaccggatataggattctccagctcaatgtgaagaagacatatttaccaatccgctccgaggacggcacaggatcccctcccaattgccaaaaaatattccactcctttgaaacaagcataaacgcagtcagcctgtagggtgtttccgggtcgacgggatagcccttttcacttaaataattccggaaagcctgttcaatcctgtcctcgtccggttctgcagcagaggcgggaagcattataatcccgcccaacagaagcatcgataagaaaatacataacacctttttgcacattttcataaagcaatcctcctttttgtcacctgccaattgcaaacaaatacaaaatgagatttatttgtttgtaaaattattatagcacatgcatttgttttgtttgtaaaatttatccaaattaaattcaaaacatatttatattttattgttatcgctatttttgtgtgcataaatgtcttctcgcaaagctgcttataagcaaattggcggcgccatgcgaaagcacagcaccgccgtcattttttataaattcatttagccatccgagctggcgtgggaaggtagcttttatttgttttacattcccgccagctggttctgcagaagcctaacatccgctaagctcacctggccgtcgttgttcatatcgcccagataaagctggctctcgtcaaacgtgattattttgctgatataattctgcatctttaaaacgtcgcttgtattaatcactccgtcgcggcttacgtcgccgcggcgatagcccaaaggttcaaaataccattgaaagcgttccggcacgccaacataattccatatggctgcgctgccatcctgtgaattctctatggtcagcaggctctcaatgccgggagtgacagggcttgcaagcttgattcctaacgtattattgagcgcattgccggcatagtaaacggactggccgctccctgtatctacaactacctggtttccgccggccgttttggtcagtccgccggaaacggcatcggaattcgtcttgattgtaaacgggttcgttccttttttgctggaaatccactgctggttttttgctccggtaaaagcggattgaacgacttctcccgtggcttcattaaccgtaagatactgcccgctgtccttatggcggatataaaatacgccctccggataatcggttccggtcctattttcctcataagccattttgtccgtgctccatgcatagccaaagcgcactgtttctgtattggacacatcatttttgctgaccttgatttggtattggttcgatgccgatgacaatgggaaatatgccatttcagtagagctgtccgtattaagcgattctctaacaagggaatcgccgcggtaaacgcgcaaatcaagattttgctgcgctccgaccgcaatgctgccgctctcatggccagctgctgaaatggaattttcctgcagccacgcgatgctgacgttcatgttcgccgcaccgtaaatcggctggacaaagtttctagtttcttctgcgtcggatatctctccatatccgtactgccgccgcgaaataatgcagactgcgttccatgcgtctaccgctcccgcgccctgcttatttgtaatgccctgctccattgtttccgcaggcgagctgaataccttccgctggcatgacgcaagtaaaattgccttgagcacctgcggctgaaagcttaaagacggccttagctccaacagcagggccgcgattcccgtaataatgggagcagaggtgctcgtcccaccgcccaacaggtttttaggggcaagaatatccggcttggcacacccgcccttgttgttatacctgctgtaatactccagattatcgtcagcagggtttgctcccgtttccttgttatcatacgcgccgacggcaagcgaattgtaagccatcgcgggggaaagaatcggataattcgggaccgcgccgttttcggccagattatttcccgcagaacaaataaaaaggacgcggtgctgtgagctgagatggtcgaaccatttatcgattgaactataaggcgtttgatatactctccagccaaagctcaggttgataatttcaacgcccatatcaagcatctgctctatattggcatagctggaatccgtcgcatataaggcggcatttggcgcaaccccgttctgcacacccacaatcgtccgggccgtatttgtggcatgtccgtcctgcggcgcgtttccaacgggaattacgttaatttcatcatgaggctcaggcgggcccgattcaatcattcctaccttgacgccctgcccggtcaatccggttttggaataggccctgtttaagcccgtggattcgctaacagactcaattccgcatttttcagccttttcctcttcataaaaatataaggcttctacctcgtcggagtccgctaattcctgtatttgggacatgtcaacctttgcaataatagcaggcgcgtattcgctcctgaatataatattgctttgcttcaacgaaatatcgtccaataactgtgaacttttctcacaatattgggtacgcgaaatttcccgccgtttcatcacataattttcacatcgctcctgctccaactttctgcctaccgccgtttgacgcaggtagtcctgcatctgacgggcgcctggctgttcattttgcagggtgctgagtaacgctgaatccggcattttatattcaaccgggagggtcttctctgtaaggcctgtttgtttttccgcctcctgagtgacccttttctggtcgatatccttgtaccaaatccaaacgggaagcgattgtccgtcagcactttgcaatcgaagccggtctatttcctgtaaaagggggacggatattttaccttcctgtaattcgggctctgtctgcgcatacgctgaagcaggaacgccgcacagcaggaatatcagcaacgctgccgtcattctattcaaaaaatttttcatcgtatccgctgccctttctcgaatgcatttttagttatgaaagcttagccagttgcttttgaagcgccaaaacatcttttaaatcaatcgttccatccgcgttgaaatcataaaaaaggaagtcacagcagcccttcccaatctctgtcattttacagatggccttctgaatattcaagacgtcctttacttctatgccgccgtttttatcggtatcccccggggcaaaaacctgcaggtattttgagggaaccccggccacctttttaatatccaggccgcctgcgtcacaggcctccttcaaggtatagattgtttcgtccttctccgcataaatcccgatgtcataggggtcgtaggcatttgttgacagaagcacataatccccaattctgtcagacgtgaaaacaggcagctcaaagccgggatgtccaaaaaaaattgtccatccgtcaatatccgcaatcaagtctacggttgccatttcttcaccggagccgtccggaaactgatggcccactccattggcgtccaggtaagaaataaaatgttggtgaatcgccgccgcgcgcccttcgtttggttcctgagcggcggcaggcagcgccatacaaagaaccaaagagattgccaaacatatacaaagcggtcttttcataaaaaaccctccttattgcacgaggtatattcctaactaatggatatgaaacaatttttaatttatcttacatatttataatatcacaccaaattattttatttggatattttatccaatttagattcattataaattcattattttgaagcatttgtccgctcacattctattttatgtcattcggcacgcttatggaatgcgtttttatcaaatgttttatcagttattccctttcttacatgatagtctaaccctgtccccattatgacaaagcggcgcccgtatttttatacaggagccgcctttatatgtaccgccctatcgggcggttttatcttggatagttaatcgcagccacagccgcaggagggctccgaccagtcgttgccaaagtcgttcgcgttgttaaacgcgttattggacggaatctggctgattattgccctttcgtcaaagaggttcggggtaatctgataggtgaccgttaccggaactgtcgccgtaaaacagcctgttctgcggcaaccggaaccgcccctgtttccctgattacagccacagccgcaaccacaatttctgcaactcatatatattaactccttttatagatgttcagggacaaccctgtattatagtgtatgttccaggggacaagttggtgcatagctcggtgataaaactctgaacatcgcccgccacacggcgggcgatgttcagagttttaaatcgatgacgtgttttacggggtaaatggaaacggaaatctgataatgcaaatgctcaacattgctccagtcgtctcctttaaattgctctgatgtaagcaaatagggcaaaacaagcgttttctcagagccggcctccatttccatatacccggggcccgtttctcccggattaagaaaatggaacagctcaagatccatgccattgctccatgtttcggtctgcgcctgcagcatggccggaatagcaagctcctgcttgctattggaattgttatgaaaaagaacggtaatgagcaggaacctaaactctgtattcccggtatcgtcggacagggctatttcatagtccggcgcagcttttttcacatcttccacagaagcgagcctgcatccggttgcacgaaccgacgccgccccgccgtcgattccctcattcatcttatgccgtacaaccatagtctgcggataccgtacatttatattataaatttgcacggctgacaaaattacagcgctggttaacgccagaacaagtaacgttgccagaatagttttacgcttcatgctcttctacttccttttgtataacgttatggtcggttattttcccttcgtacattacaaaaatttcgtccgccaggagttcaagctcttccgtatcatggcaggctactacaataacagcgccgcgctgctttgcttccttgagcaggccccttacaagcagcacgccgttttcatctaacgcgttgattggctcgtcaagcaatacgatatccgggttctccatcaccgcacaggcaatacccagccgctgtttcatcccaagggaatatttgcggtaggtccgcttgtcgtcggggtcaaggcctaccgcttgaagtgtttgcctgattttttcatcgtcaattttgttttgtatcccggcaaggattttcaggtttttaaagccggtatattttgtaaggaacgcaggattttcaatcaggacgccaatactcggcgggaacgaaatttcttttccaagctccctgccgtctattaaaaccgagccggacgacggtttaatcagcccgcacattgcccgcatgagcattgtctttcccgacccgttctttccctttaagccgtacaccctgccgccttccagctttagggatatgccgtcgagcaccttagccccttttattgttttcgacaagcttttcatctcgatatacattttgttcctcctagtctttttgcaggatgtcataacgcctgaaatatatcaggccgataaagaatgaagcgcacagaatcgcaacgtcggcaagaaccgcgtaaagagtatcgaccccgccggcaagcgcgatttcgctgcgcagcagcatagaataatttcccggcaggaacggcgtattatagtatgccgaagccaaaaaaatggcggtaacaatcatatagccatataccgggcgcaatacaaaattgagcatcatctgaaaagcggccatggccgcggaagttagaaagggcagaatcaaaactacagcgagcgtctgcgcatagcccgcgctgctgctaaattcgctgacaaacagggtaatttcctggtgaaaggcaaacgacccgtcgcccagcaaaatggaaaaaatgaacgccacaaaaatgcctattaaatagaacagcgcaacacttaaaatattccatatggatttagatatccaccatacgccccgttttcttgtgcgcacaaggaactgcataccatatgattccaaatcctgcgtcggatagcttaaaattaaaaacgaaacaacaagctgcagcatcagccaaacgacagggattggaaacgggttctcccctgtcgggatgtacacctgcatcccgcggtaaaaataaatcaggcaatccagagctgagccgctgcccccggccattcgcgccgactgaaaaaacatgaccgccgcaaaagcaaatacaaaaagcgcaagcaggtatttcaggatattccctttcagcccgacgcgcaggtcatacctgacgcatttattaagcgttctatttctcatgcagaaactccttatacttcaggcaggctttccccgcgtaaaaaaccgccgcacaggccgccgcaaggccaagcagtgaaaggtaatggtaggaagggacgaaatcactgtacgaggccccaaaacgggaaacaatgccaaaattaccgtacgaatccagcagcccaatcaataaaattatgataaagcatataaaatcgcgcccaaacagccagcgcagggcaatatacagcaaaaggaacaaaaaaacacataaaaagccgtaaaggaaggttaatgccaggacgccgaaaaaagaaacgctgctgatttgcgcgtccgtataaaaataaaaggcgctgtttgtctgactgaaattaatcagaacgggcgtatggagcgccgctacgcccagcgtcacgatagtttgtacaagggaaacgccaaacgcaagataaccagcggcacagcagtgctttgcgtatagcgtaccgatgtttttctgtcttactataaagttaattttaaaattgttttttattatgcgaaacagcaaaaatacggatacaaatatattagccagatagaaaaacagcggctccttcaaaagcaggaaataatccgcaatgcttacaaccctctgttcgttttccactgtatggacattaggaaccggaaaagagaaggacagaaaaatcagcagtaaaacggtacaacagagcagtattttatgttcccgcacaaagaaaaacagttcgcggtgcagggatttaatatgtttcatcttttttcacccgcacgcagtaaattcccaatacaatcagcgccagcagcaaaacctccgcaccagccttaacgggttcaatcgggaaatactgctgcggcatcagccattgctgcatatcgagtcctatatctgaaacaaatcttgacaggaaggtaatcagctggtaaacaataaaaggaaccagcagcacaacaaaccggtatttgacaaaaaaagtcgcggcgagcgcgaccgttgcaagcaggccggaaacaataaaaatcatggcacaaaagattgccgtatagagatagggctgcgtatagaattgttcagcccacaatgacgcggctttgggccagaaggttcccgcagccgggtcgggcataatacttggcagcagcattgcggacaggtacaaattccaaagcagcggcaggactgccgccgcgccgccggataaaaaaacagagataaattttgccgtataatacgaccttctcttcccgcgcgtaaaaatatttttcacatagccgctgcggcggtccgcgtgcaggctgtcggcaaacggcagcgccgccaggattgggagcagcgcaaaatacagcaccacccagtaggaattcccgccgccaatccacttgctgaaaacgccgtgcgggtatatgtctgactgcgtgagcgattgctggtactgctgcatgggcagtacttcggcaaaaatttgaatggtgcagacagcaagcccaatgagcaggcttgcggcaaacatgcggtttaaaaacgcgcgtttcatttcaattttaaaaatccgtttcataagcgctcccaacctgtttttggtttgtcttaatttattttatatgccttgtcttcttccaattcaaagccaggctgcttataatcttcttcggtatattgcgcatccaatataaaatacaaattatcagcgttgattaaatcgtcgtttacaatcgtgccaatcgtgtaaacggtcgattccccaggctcaaaatactccatgtaatagctttttctttccggagttccttcttttagtgtacttaagtttttgccgctgcggtatatacttgttatggtacagtttttataggacagctcgtcatccagtgcaacgaccctaatctgcattggaatcaacaatctctcatctgctttgttcgtaatcctcgttgttacaaacagataggttttgtcgtcgagaattgttccgtctttatccgtactggcctgcgtcccgtcgttcatatagtcaacgtcttctttttttattccagcaggcagcttctttgtctttttaattttgatatctgaatattttacatttttatattcaatagatttgtttcctaacacaatatttgctttatttataaagtttctatcatcgtctgtaatatctgaattattgtcaagcggaataggtttatctgttccttttagaaattgaagttcggaaggagtggaaatcgctggctcctgcgcgcaggagggcagcaacaggacgctcatgcatacagcgcaaagaattggagataaaaattttttcaatgatagtcctccttttataagaaccggagccgcttaaagcggctccggccagcaataagagctgtttagacgctatcagggctccagtagaattttactgtaaaagaatttatcccacccgtacctttcggataacaagccattcctgcaaagtttgtataagtcgaagagttttgattgtaattttctctaacgtagttaatcatatacctcgttgtatttttagtaagtgtatagacattacctcctgaagcgttatattttgaaccacccacttttaaaccgtacacataagaaatgtatggcaagcccgaagaatccacacatctttgatacgccgaggtagtatcatattttggacgagccgtatcagtataagaggtcttagaggtacttaggtcaagcttctgataactatccgagatgtttcccgccgcccccgtatttaccgcgaacagcgaacaggcgagcaacacgcaaagcgatatgctcaagatttttttccgcatagttgatcccccttgttttttaatatttcctgttttgtgcacaaacagatttcagataaataaaatatatataatttatttatctacaataatttaatcatattatttataacttgtcaacataaaaatttgtctaatcacttcataattctatattatttttataacacataaagctttattcaaattataaaatttaaaaataccgtatcaccaggaaacaagcggcattttgcggattggtacaaatatcaggcttaaatttttctgctgtttgctgaatttattctcaataatcgaatactatccccgccaatcaacacgctgctttccgccgcttttacatcctgttttccgcttttggcgcaatccgcccgaactcttgtacaactcctgcatattctgatagaaaggagttgaatcagatgctttggaacgacgcctcaaaaatttacgcgaaaaagattttaaacgaccgcccgaacgctgtcgctaaaataaaaggctccaaaaaatacgcctctatcaagggtaccgtatcgttttaccaaacgctgcgcggaacgctcgtcgtcgcggacatcgccgggctgcctgtcgaccggacgaagtgcggcaattccatttttgcaatgcatatccatgccggaggctcctgcaccggcaaccaggaagacccgtttgccgacgcgggcacgcattttaatcctgaaaactgcccgcacccggaacacgccggcgaccttccccctcttttttctgacaacgggtacgcatggtacgcaatgcttaccgaccggttcagtataaacgacgttatcggcaagacggtaatcatccacgcaaagccggacgattttaccacacagccgtcaggtaattcagacggcaaaattgcctgcggtgttatcaaaagatgagcgcccgcagcaggacgtgccgcggcagccggcatatttaaaaaagagtatgagaaattggaattctcatactctttttaaactatgatgaaaaacagcggctttacgggttacagccagttgtcgccaaactgttttttatactggttcggcgtacagccgtataccttcttgcataggttgataaaggacttgacgtttgcaaagccgttttcaagcgcggcattggtaacggtgtcgtggttataaatcatatccttgagcgcgtattccagccgcacaccgtttaagtattgggtaaaactgctttctgtgatgtttttaaagtatttggaaaaatacgaaggcgtcagccccacaagcgcggcaatgtcgttgagcgtgatttcctccttatagttctgtcccatgtattcaattgctttcttcgcgtaaataaaattttcctggacattctgcggatatctgttctgcttatgaacggcgcattcacatagcagggtatggtaaatatccagaagccgggcgttgatttccaaatcggtataatcgtcttccccgcgggattggtccaggtcgattatcctaagtacgttttccttgatttctttcttcgcctgctcgttattttcgacctcgaacgcaatgctgtctatctttctgcagtaattgcgcataaattcataggaaagcaggataacaaaatactggtaaatggtgtctttatccggcaccgacgtcacatggatgtcctcgctgttgacaaaataaaattccccgtcgttgatggtttgctccttccgcccgattttcacatgcatcgtaccatgaatcatataaacgatttccaactccttgtgccaatgctgctttgtgttgcagcggtaaccgggcttgtcctgcattaaaatttttgcgggcaggtttttctcgtacttaaccgattcaaatgaatacttcatataaacttctccctctctgattcccttcataacacgtatcatgctgaaaatatcccgtacagccgcaatccaaataatagctgcggctaaatacttccccttgatttttgccggacatttcaatcctttagcgggcggataaaggctatttttattataacagaatgcaagcagccagttcaacctaaaaaggcggtttcttgtcaattcattttatatctgcggcgcgtccgcataacaaaaacgaaggcggtattttccgccttcgtttttgttggtatatccgaaatagccgcagtagttatttggaaagcaaatcagtaatggcttttgccgcgttgtctacgtccgactgggaaacggagattttatccgggctgtaggacgtcttgttataaacggcaagcgccgcgtcgatggcagctgccagttcgtcagaaggagcagcttccttctgcgcgttggcaattgccttatggagcgccgtataatcaacgaggttttcgttgtttttataatcgtagcgtttgctggtaaaccacgcgtcgctgcttacagacgcggtcatgttatatttgccggaaccgttgaggaacatgacttctacagattcctgagtcgtcttaatggtgtaggaataccatccgccgtatccgtcagcagacccttcgagcgcccccaggtcggtcctgttttcaaccagctccatgtcgaacgtctcatcgccgattttcacctgcgggacgtagtattccgtaccgcgcatatctttaaagtacacggttattgttttttcctcgccgggctcggccggctgagacggctcggtcggtgcggaaggctcagtcggggcttctgtgtacttctgccaggaaccggctgagctggaggtcgcgacatacatatcgttttcaccaatgcttactgccgtcttcgggaaggaattccacacttttccggtcgctgaatctacacggttaaagacgaccgtatcccaatcctgcggaatactggctgtgtagagcttaccgctttcgtccggcgctgcaatgattttcttgtcgccgttctgcgcaaaaataacggcgccggcgtctccaaagtcccaggttgtttcatttttgagataaatgttcttgtgcgcaacaccctcaaattccgccgaatcgtcctttgtaggatcgaacggttcctcagatgggtcggtagactgtgaaggctcagtcggctgcgacggctctgtaggtacggagggttcagtcggctgtgaaggctcggtcggctgtgaaggctcggtcggctgtgaaggctcggtcggctgtgaaggctcggtcggctgtgaaggctcggtcggctgtgaagggtcggtaggctgtgaaggctcggtcggggcttccgtgtacttctgccaggaaccggcggagctggaagccgcaacatacatattgttctcaccgatactgacggccgtcttcgggaaagtattccatatcttgcctgttgcggggtctacacggttgaagacaaccgtatcccaatcggctggaacgcttgccgcccagattttaccggaatcatcagcctttgcgatgattttcttgtcgccgcattgtgcgaagataacggcgcccgcgctcccaaagtcccaggttgtttcatttttgagatatacgttcttgtgtgcgacgccctcaaattccgctgaatcgtcctttgtaggatcaaatggttccgccgggtctgtcgggtttgtcggattggatgggtctggctcagctccctcaaattttgcccagttgcctgtcgtgctgcctgttacacagtacatatcgttgtccccgcgtgccgcaaccggcgcgaatgcgttccatacctgcgtggtatcgctcgggttgacgcgcaggaaaataatgctattgtagttgtcttggattgtagcggaccatgttttggagccgagataattgagcggtaccctttcgccaccgtcacactggacataaagcagcgcgccgtccgtcgtaatatcccacgaagtctggtcctgcagataaatcgtcatcggtttgccgggttccgtcggcttttcggggccgtccgggtcatagtcggaccatgtgccataggccttttgtgttttctcgccgccgacaatcctgtaaattttattgaagcccgcgaactccaaatccatcgtctggtacgtgccggagctaaaaatcaggttaaattccagcgtggtttcgagaatttcgctgtcggaaaccgtaatggaataaatgttgtctttcaccaactgcatctttgtgccgggccatacgccgaaatatgcgtcgccccaggtatagaaattagcatccttccaggattcgggtttttcaaagtagataacgccggctgtcgtgtggtattcctcccactggcctgtcgcgctgtccgtgttttcgccatccgtcactttgtacttctggttaaagccgttaaacgggatttcaattgtcttacagtctttgccattgctgaacacaattgaaagcgggtctacgggctttgtcggcttgctgcgcttttcatcgatatggtacgggttgcccatgccggcaatatatttttgaatctccaggacatccttgatatttgctatgccgtcgccatttaaatcggctgccagaagctggtcttccgtcaggctaattttcttcgcggcatatttttggatttcaagaacgtccgcaacggaggcctttccgtccccgtttaaatcgccgacgatgtactggccatccggctttgtcatttcgcccgcgtagtcacgcagggtgatagaataaatgttgccgtcaacgtgttccatctctacgcccgggaactcgcctatagaaacggcgcccgtcgtaaaggcataaggggtttcccatgtttcaggaagctcgaaaaacacctttcttgcatcataatccgtaaagtccttctcgggggcttcgccgtagctttcgtttagtacgtccgtaataaaatcatggataaaggtattgtccaccttatcggaggagcagaaatcccatgctcttgcgcccgccgcgtacagcggaacatctgctcccgtatggttgcccgtggagaagagcgcattggtcaggtcggaagcggcagcgccgtccggtaccttcagcccgcccgtttcgtggtcggccgtgacgagcaggagcgtgtcaggatgctctttgacgtaattgttcgcaacgtcgatggcctcgtcgaatacaatcatttcctttagcattttgtccatttcgtttttatgggcataggaatcgatatccgagccttctatcatggcaaaaaagccgttttcatttgttaaacggtccagtcccgccttagtcgtatcagcaagcctgggctggtcgtctgccgttatataagaggtatggaacgtgccgagaatatttttggatgggtcagccgaggcgacggaagccaaatcgttcacacgcacatagttgttcgcctcgattgcctcttccctgttatcgaagtatgagccgcctccgccaaacaggacgtccgcctgcaaaagcagctgctgcgcggcaatagagttataggaataacgggccgagacatgcgccgtaaagccagccggggttgcgtgcggcagtacctgcgtaacgatgacgcccgccttgagccctcttgccttggaaaactctatgaggttttccttcttcgtgccgtcggcaatcataccgaccatattgttgtttgttttatagcctgtcgccatggcggttgcggcagccgagctgtcggtaacgccgtcgtttgaatatgtagtgaccattgtggaatagggcagcgtctgcattacaagcttggagcctttgtaaatctccccggccttcgcctgctccgcgcccatgccgtcgccaatcatcaggataacatttttcaccttgtaataatcgagcgtgccgccgtatgtggttacgccggattcagtggttttgtcatccgcgtcaggcaggaatatctgcccgtcctcatagcccgatatatcctgcgtgcgctcatttgctccgttggaaaaataaacgtccgccttgctgtccggaagctgcgcgcagtatatgccgtccttgtcttttaccttttctgttgcaagcgcgccggctgccgtatatgcgcttatctgctcccagccgagcgtatttctgaaatataacgttcccgcgctttcggggatgtcctgagccgatgccattacgccgcatactgaaaacattgtcacgacgattgcaaaggtgagcatccaggaaagcagctttcctacttttttcactccaaaaacctctccttctaaaattaggtaggctatttttttatttccgcgaaacggcaataaaaacacccaaattaccgccgcctgcctgttgacattgcttcccataaaaaaatagcctatgctttcattataaataaattcccctgatttgatatgcttatttcatctattttattgttgttttttatgtttcgaccgaaaacaagcggtttttggcattgtttttatgtcattttttgtgttggatatgtatgaaaaacaagccatttttttggcctaataacgcttgcccccataaaatggaaaacagccgcccttccattaacagaaacatggaagggcggttactatttatggcgcgtacgcgcgcttgtttaacggttgagcagataaacgcccaaattcaaatatccggcgaaggtcacccacaacaaatatggaatctgcaacagcgccgctgttttattgattttcgagaatgcgattatcatcgcgagaatcagcacccacagaataacaagccagataaacgcgaacagatatgcctgcatgttaaagaaaatcaggctccaaacaaaattaaaaaccagctggattgcgtaaagaacaagggcttttgttttgttccggtcatctgaaacaaaaatcagatatgaggaaatccccatcaggataaacaggatggtccagacaattgggaaaaggaagcccggcggcgatagcggaggctggttcaggtttgcgtaaacatccatgcttcccatagtcagcagcgcggacaggccgccgaccgcaagcggaatcaaaaggcatataatgagcggtttccatttaatctggtgcattgtatcatctcctcactttagtctatgccgcaaatgagcgcgatatgtaaaacaggcgcacggaaaaaccgcgcgcctgcctgcaatatgctttattgttcgtcttccccgccggggccgtcgcggcgctccctgtcgtcggtaaacgcctttgtactgttttgggatgtccattggttgttgcccgcgtccttttcgttcttttcccaatgaaattcatctgaacgcggcgtattctgctgttttttatcctctggcatacaatcctctcctttggctttagcttacccgtttctgattggtttattagccgtccagtcaaaaatccaagccaagggaaattagtaagcacgcggcgcgggcaaaatcatcctatcccagccttcagccgcagcattttaaaaacgtcctccagctgttgccatgtcagcacgcggtaatgaatccagccgccgcttccgcaggggtatttattgtctatcagctttttcgtttccagcagggctccctcatacattttatcaaattggctgtcagccagcctcagcataaccgtaaaagcgccattctccgcaaaaatgtcgcagagatgctttctttttaaagaatatttcaacccccagccgtagtgtttcccataaggaaagcgcatttctttttctgcgtgcagttgatttatcaaaaaatcgtccgctttttcaagcagcgctttcctttctccgcagtattctgtaaattcctcgtaggacggctgtgtttgcccgtccagcattctttcgtacattatgttatcctccgttcgtgacgaaagcatttcttcccaccgcgtatatactgcttccacttgcagcaatcatttaaatgcagtatgacatggcgcgttggcggcatgagcagtaaccccgctacatcttttttgccccaataatcaagaagccacagtgatttttcctggttagccactccgccggcctgcttaattgcctcaagcccttgcggagataccttgcgctttatgccgtctgcagaaagcgattttacaatatcgcgtgtccttcgcccaacagcatttcgatacgcagcaagttctttcaggtccagctggcggctcaattccataatctcatcatctgataatgcattccccgtgtcagaaatcggcgcgttaaggcgtcttttccatttgccgtcaaacagctgctccccaccggcagcaagaatgcccattgtcaaatcttcaattctcgctatatgccataatacccatgcaattgtttcatcggttgaggttggcataatactgtattcgtcaggcgtaaggtcattgagcagataatcgacttcatttttttcagtacctgtcatcgaggataaatgcagcctggaatgtatttcaagaaacagccgcttggcccgctcaagctggtccggcttgcgaatcgctgcatttaattccttgtgcagcccacttagggcgtccccaaaatatttcatcttatcagcccctgcttcgtacgttttaatatctcattcacccgccggggagcatcggctggcagacggggcaaaaatagatattaccgcccagatagctctgccttacaatttccgcgccgcaggccggacatggccggcgcagggcattcttagacaataccgtatggtaaccgccgggatttccatacaaatctttttccgtatccctgccgcccttatccgtcatttcccttaggatgtccttcacgctgcggaacaagctttccttatggctgtccgaaagcagcgaaagctttgttttcggatggaggcgcgcacggaacaggatatcctgcaggcagccgttgccaagcccgggtatccgctgctccgtcgccaaaaacgccttgatgctcagggactgctttgcttctgtcaaaagcccttcaaaatacatttcatcaaacatatcttcaagcggcgtaggcttttcaaacgccacccggtaataaaaattatcgttagccccttccaaaaacgcccagattccgccgtacatctgaaccgtgcaggcaagcgaagaaccgtcgtcaaacgcaagcaaaagctggcgcttctgcggcagcctgccttccggggaaacatagcggatattcgcgccgtcaccaaacagcagtcttttatcccccagcaatacctctacttgtcctgccgcagcacgcgcgccggaaacggtttccccttcgagcagcgccgggtaatctttggggtctccaaaataaaacgcaaagccgtgcggcgactcattggcgcgggcctttacaatttgctttcccttaatggcctcgttcatttgggccgctatagtatggctttccggcagctccagcatgcgaacccctcctgtaagcttttattttagggcgatgtatatggatacttcctgtgtttttccgtctggtgatgaagtatattgctcaaaatcgcccgtatacgaccgaccgagctccatgccccaaatttcttcccaggcctttgccacagcggctgtgtctccgcttggtacagcaaatacggcgtattttcctgcgggcacggtttttacagctatctgctgcggcaggccgtcggcgtcctgcaccctgcatccgactgttatatcgtatcgcgcgcgataatcgttttcatagtccgaatacaggccatatacatgctcccccatgcggttaggaaccgcctgcggcccgccctgtgcaaaaaagctgttccaaagcgagccgataatccggcccatctccgggtcaaggttgcttgtacgcgcgcttaagcccgcaatcttcatttctggtaggtttactgtttcataatgcattgtttccgcctgctttccattttttctttattttacagtggataacatgacggcagcctgtcatatttcataatttccaagcgcttttttaagccgctgcttcatttcagtgcgaacccgctccggtttaaggaccaccagccccgggccaaatgtcaaaaggtaatggtaaagccagtcgtcctcgggcattgtaatctgcacgaggaaagagccgtccggcatcagccggcggttggccgacgcaaattcgtcataaatgcggaaggaaagctccggcgcgattttcgcctgaacctctatccggctgcgcgtaggatatgtattttgacggcgctcttcttttggtaaagcaggcgcgctgcgctcaaagcgctcttcgcccaaggtaatgcagtccatcctgctgagcttgaagtaccggttatcctcccgcatccggcaccaggcgtacaggtaccagtcataaccacgaaaaacaaggcgaaggggcaccgcctgacggtgcgtggttttgccgtccgaggcacagtagtcaaaggatattaccgcccgcgagaaaatagcctccttgagcagcgcgaggcttctgcttatcctgtccgacgaatcccatgatgagaaatcaatttcaatccagtcgtacggccggccgccaaacagggcggaaagctttccaagaaccgcgcccgtctggccgggctggagcgcgttcatcccgtgcagggccgaaaggatgctgctttgctcttcctttgacaaaacagatttatttaagataaaattgtccatcaaacgtatgccgccgcccttgccgcggcttgcaaagacgggaatacccgcctgggaaagcgtgtcgatgtcgcggtatatcgtgcgtgccgaaacctcgaacctgtccgcaagctcctgcgctgttatacattttttatcgagtaaaagatagacgatttcaaataagcggctgatttgcatcctgttcacctcaaaaataagtatagcataccgctgcagcgcgggacagctccattttaaacttatatagataataaaaaggaaaacagccgttattcatcgctgttttcccacaatccacattgattgcacccggcactaagatttgtttttcaggatttcccgcctgatataggtgaaggctgcttcttctccctcgtccttgagcctttttagcatttgttcgagcaaagcgcgtgttttcggatgcagcaggtaatggtcccgcgaattcatataataatcgtaagggtcgctgttccggtacgctcccttccgatatgtcttgctcgcggccatacggtcacaaaacatttcgaccacatattttaccggcatttccattcctgtcagcgcatggtcgccggtcggcgaatagtcaagccaatattcaagatggtgcttgtttcgtcccttatggtgcagccacgcgctgctgtagcccttttccttccgttctatttcattcgggcttcggtttccctgaaaatacttcgctcccaccaaaaactccacaggggaatattttgacaagtcgtgcattatcccctgccggtataagcctacccggaagcagtgcatcatgacgagccgcttatgatgattgattgtcctcaaatgtgcaagccatttaaccatgccgtttatcccatcccttccacctaaataagtatagcacagacaggtcgattgtccagaggaaaaaacaagggataacatattcaaaatagaaacgcccctgcctcaaacccaaaaggcaggaacgtttcggttaaagtaaatcagtcaatcacataacatcagaacgcgtcgcagacagtccaataattcgcatccttaccatcctgcaccgcaacgattcctatcattccggcgttgtccgcactgcacgcgatgtcggggcgatagtggacttcggggtcgctgagcacttccagcttcttttccccaaagttcgggccggacgctgtaaccgttacgttaaacgtgccgaaaagccccggcgtctgcagaattgccatcggatggtccgaggtaatttctcccacccagttgcttgtcgtgtgctccagcctgattttccatttggtcacgacatcaggggtatgattctggccggaaatatacccccaaaactgcgcgccgcctcctggatgaaaatcttttggaacattacatttttccatattatttccccatttcttataataattttgtgcacatctatatactacttgctttattaaaaaaagtcaattaaatttcgaaggatttaaaaatttatttaaaatcttttattgttaatttcttaacattatattaagaacttttggatgtactggaatccttctatacagattaaggaactgccggcgaaacgcgcggcagttacgatggtaccgtatggtctgagcattttcttaaaacacattcccagcggacaggcttctttatacaaaaaggaggacgccaaaggcgtcctcctgcaggtatcatgattattcattttaaccgcgaatcgcgcgtttcctgcttctgctgtgcagaaatataaacagcgcagaaagcagggccagtattaccgccgctaagaaaaaggaattcaaaaatgacgtaacacaggtataataaaggctgaacagcgcctgcgaacgcagcgccagcttatcgattttatcgattaaataaattaagacaggaaccgcaaccgtcatcaaaaaggctccaagcagggaataggaaagatagcggtaggccctgtgcttccacctgtttgtcgcaatgataataatgccaatcagcagaatcaaaacgcccgcgccgattgtaacatataaaaccggatttaaaagcttatgaaagtaacctgcggccaggccaagataaggcagctcaatcctgttgatgtaaatatcgcaggcttccctgataaacgtatcaagcccagctttcgcctcatctgaaaccttcaggtcattatccttaatatactgctccagtttagtggtcagcgtgcttttgaaggccgtcgcatcgattgcggggtctttaccggaatagaagcttttgatataggatgaaacattttccctgagtgtaatctcatccacaactccggtaaaaaatgcctcgtcgattccacttgcgttaccgaggtcaatcagcccttccgtaatttcggaagaaaggtcggtataataattggtatcgttgatttcattcaatataaagtttttattcaggaatgtggactgtaaaatcacgagcagggtaaagaaaaagataagcatggaaagcaagaaagcaaaaattgtgtaaaccacttttgcgcccttaccctcctgcgacgatttgcccatattctatccccctcacttatcgacgataatctttggaccggaaaccggttcggcgtatacgaaaaacctctggtttgtcagccccagttcatcaaagggatagcatgtatacataacaaggttttcatggtcggcattcaggttcagagcggtagggtcggtgcttggccgcacctctgtacccgtcacgctgtaggtaaagttaccgtagcttgtcttgacggttacgatatccccctctttcacggttttcagcccgttaaaataggtgttgttatgcccggcaatcaaaatcgtcttaccgtagcccgggataaaactgccgttaaaaacgcctacgccgtttcttaaagaaacgctgccgtccccaaagaaaaggttgacatcctgtacagtcgttccggaaaccgtaatcttgccaaacatctccccatagcgcgggtaatcgatgtcggaagcgttcaccgtctctttgacgtttttatcgtcaaccggaacaaagatattattgtactccttgttatagtcaagcttctggtcggcaaaaaacatgtccgcaattcctatgaacggggacatgaccggcgaaagcgtaacgaacaaaagtaaataagacagtataaaaaacgcaataggaagaattataaaattcttcctactgtatttcatcatatttttgctcatgataaattacgccctggattttctggtcttcgccagataaatgcccgcggccgctacaaagagaacaatcatagaagaaagcacgatagcagctgtagcgtcggacgccataccggtgggcttaatcgtaccgccgcccggcttgtcgccgccgccgctggtacccggctgtgtcggagtaaccggcttaagcggggaaatagtagcaggcgcactgaaagcgactgttccgtccggagcaaggattgtaaccgtattgtctacaaaatcggccgtcagcgtcataccgagcacagcgaccgcctttttgccgcagtcgaggatgtagagcttctcttcatatgtaagccctgtaatatccttcgcgcccgaagcaataaaataatcgataccgtcctgaatatacccggtgatttcgtctgcttcctgcgccgtcatgtcaatcgtattgaagtaattctccgcctgattgacataatcagcaggaataacatactgctggccgtctaccgtaaccgactgggaaagtaaatcaagaactttttgttcattttcatttattccgcctgcggcaaaaaccggaactgccatagcaactgtgagcaacagcaccagtgccaaggaaataaactttttcataatagtacacccctccgtgtaaattctggactaatcatatcatatccgtaatttaaagtaaatacctttttagaaataaatcttgtatttatgttatttttttgtcattttcaagtgttttgctgttattaattatcaactggcaaaaattggaacccagttttttgtcaataataccgaatcctgtttgaaaatcacagccgcgctggtacgaatgggtatcggttcccacaatatggacaagccccttttctatcagctttaaaagcttatgccgcagcgaaaagcttgaaaggctgtccaggttaatctgcatgcggcagcccgcgttgtacagctcctcgagcgtatcaggatttttcatcaaaaagcggtaacgctctatatgcgcgataacaggggtcacatgaaattggttcaccagccggtaaagcctgtcgccagccccgtcggaaaagtcggaatcgtaggcaaactcagtgagcaggtagcgcgtcccatcatagcaaagcccgtcaatggatttattattaaaaatgtaatccgtaatatacgcctcgctgccgagaatgaacgtaaccccttctattttttttgaaagaagcagttcatatgcagcccgccgtttttcgtaaaaattttcaaggctttccctgttggaataataatggggcgtcagcgcgatatgtgtgactccctgcgacctgagcctttctgtcagcgcaatggaggtttccaaatcctttgccccatcgtcaatcccgggcaggatatgggtatgcaaatcatacaagtccgtcatgatacccttcctttcagcaggttcaaggccgctggtcaaatcagcgagcagacgaggtcccccatctccttacagctgaccttagtggttccttctgtatagatatcgggcgtgcggtgcgttttgagcgcctcgttgaccgcgttttcaatcgcgtcggccgcctgcggctgttcgagcgaatagcgcagcatcatagaaacggaaagaatcgtggcgagcgggttagcaataccaagccccgcaatgtcgggcgcggaaccgtgaatcggctcataaaggccggcctgcttttcgttgaggctggcggacgctaacataccgatagagccgctaatcatcgacgcttcatctgaaaggatatccccaaaaatattggaggtgacgataacgtcgaactgtcctgggttacgtaccagctgcattgcgcagttatctacatacatatggttgagttccacctctgggaattccttggaaacacggataaccgtctccctccacaggcgggaggactcgagcacgttcgccttatctacgctcgtaagccttctcgaacgctgcatcgccatattgaacgcaacgcgggcgatgcgctcgatttccgcaacggtgtacatttccgtatcgtatgccgccagcgcgccgtttttttccgtacggtcgcgttccccgaaatagatgccgccggtaagctctcttacgaccatcacgtcgagcgctttaccgataatttcatccttaattggggaagcgcccttgagcggctcaaagataaccgccggacgcaggtttgcgaaaagccccagcgcgcccctgattccaagaagccccgcctccgggcgcaggtttccgggaagcgtatcccattttgcgccgccgaccgcgccaagcaggacggaatccgccgccttgcacttctctaccgtaacgtcgggcagcggaacgccggtatggtcaatggcgattcctccgagatccgcttcatcgtatgtaacggtgaaatcaaatttctccgccgttttattgagtaccttgaccgcctcatccacaatttccgggccgatgccgtcgcccttgagcaatacgagtttatagttcttcatcatcaagtctcctgtcttttcatatggttttattatatttcagtatgccacaggatgtcaacaaagaatgtaaactacaatacaattattaaaatagcctgacggcctgcaagggcagaagggagaaacaggacgggaagataattcccgtcctgtttcttcattttaagcgtaacgcccgaagctgttaaaacccaagctcggtaatggtcaccctttgttttccccgcagcgcattgaaatcaactccgtaaaggctttccatttgaaaattgacggctgtttcgcttattgcggtatcctgcggtacggtgaattccgcagtcattataggagccagcccgttcaagtcaaacggattggcgctggagctgttgaaacgaatggttcccggattcgacgcgttataaacaggcgagccgatacgcgaaaactcaatggaatcctcattgaaaactaccgcgccggaattgtaggagactgtaccctgaaggcctgcgaccggggcggaagtacagctgtattccagcgtataccggaaggcagcccccttatggtattcctgcccgttaatcctaatcagcggcttgttcataaacagctggattgccgttacatcggcaatattgattacgccgtcccggttgaaatccgccagataaagctgtgcgccggagagcgattcgtcgtcggcgagatattcctgtagataggtaacgtccgcgttgttgatatagccgtccatattaacgtcgcccagcttaaaatcggctttttccagataccatttctgcgcgtccgcgtttgacgaatcaaagggcgcccattccagcaagacgcccgtaccctgcgccggaacctgcagataccgtgtaacataatcggatgtaagcatgcttgtaatgtagaacgagccgtcgttcagctgtgaggcaacaattttatatttcgggttgcttgtgccggtggtcagggtaacggacgctttgttggaagcagaatcgacggttccctgagtcagcctataatcctcaggcaacgcgccgctgtacatataataataaaagtcgtaatccgaaattttaattgtccatagctggcccaggttgtttttggaaaacgtatccttatatacggtctgccacggcgcgtttacggtagcgtacataccggtcgctttattacgcaggtaataaatgccctcctcagcatcgtacattgcgcgcgtgccagcctgcccagcttccaacgcgctgtagcttgccgggatacaaaccattgccagaacgagcaagacgcaaataacagcattcattctttttttcatcgttttttgctccttattttgtttcaatttttttacgcaagacagtcagcgttaagcactcagaacgccttgtctgactacttagtcagcgtttccactgtttcggtctgcgtgcccgtatatttgtttaccgccaggtcagaaaatatcaaagcaattgaaattgattttccctaacagttttggtgtttacaagcaggtttccaccgataaagcattcgatgtattctgcatcgagctccagcagctcggcaggatgatacataacacttccctgtatggaattcacggttgtgccgcagccgtagcttgcctatatttgccctttgttcccttttagaagagctgtccgttgattctggcagttttacccgcaataaacatttgtattgctgcagcatcgcgaatatctactacaccgttacagtcgaagtcagcaagtaatatctgcgcggcggtgaaggattcgcaggcagcaagatacatttgtattgctgtcgcgtccctgatatccaaatagccgtccatattggcgtcgcccaacacatagccggcgggttccagataccatgaatggtattcgatgctcatagtgtcgaatgtataccacgaaagaagggagccggacgtgttggatttatctgggacttccaaatatttttcaaaatccatcgcctgtttttttccgcttatgtaacaggtaccgtctgtattttttgacacagaaacgttaaatgcaccgtcggaaagcatactggcagccgccctgctcgatgtcgtctgcagtccctgagccagataacaggaagcgtccaacaagccattttgtacattataatatccatcgtcggcagagcgcttaatgacccatatctgattatttccgccggtgaagggctgctgcctgatgttttgtgtattttccgtatcgaccgaagcatacagtccgctgcccttgtttttcaaaaaataaagtccttcttccaattgcgcggcagtggattgcgcactgccggatggctgtgttccctgtgcgctgacgccgcaaaacggcaggcacagcaataccgcagctagtaaaatcgatagtatggtggtttttgttttttttctcattttccttaccccttttgttttttataaaacgcccagtatgaacaatagacattttacagcattattttatcaatttataaccttttatgtgaaattcagtcacataatatgtttataaaataagtaaaatatttttgtgtgtcgaaattcaggttatattgtcgaattaaaatatataggaatttattataaattatattgacatttttataaatatatatgataattttgatataaaccataaaaagcccgatatggtattaataacagaataaggaggggcgtattaaaggggagatatcgtgtcggatgcaaaaatctatattttaatctggaggaggtaaaaatcatgaatttaaaaaaaatcacatccttgctgctggcttcgcttctggtggcaagcagcttttccgcctcagcattttcagcggcggagcagagcagtacagacagcgcggccattttgcaggcggatatttcagatgaacaggcccaatcgctcgacagcgacaacgacggcgtacccgactacctggaggagctgtatcacagcgataaggataaagccgataccgacggcgacggcctgagcgattatgcagaaatttatctgcttcatactgaccctgcgaagaaggacacagacggcaacgggatagaggacggcgatgaggatacggacggcgacggcctcacaaaccttgaagagcttgcccacaaaacaaatcccgcaaaggctgatacggacggcgacggcctgagcgacggcgacgaaatcaatacatataggacagacccgctgaaggccgataccgacggcgacggcctgagcgattatgaggaaataaagcttggactcgacccgctcagggcaagcagcgacggtgtccgtaacgacgcggacaggctctttgcgcaaacgctgggaagcgcggcaatcgacgaagcgcttctggcgcaggacgcgcttcttatcccctctatatcagcggaggttccgggcttcattgaccaacgggtcaaagtaagcgcggctgaggaattcctgctgccggaccagcgcgcggtcgtgggaaaagcggtgtcaatcgattcttcatacggcagcagctacagcctgacgctcagcttcaaacgccaggcgctccaagaggactatgcctctgatttggtaatctgcgcaatgcaggacgggaaaatcgtaccattggacacgcagcccggcgcgcaagccgatacaatccaggcgcgtatatccgcaggcggtatttattttgtcctgaaagcggacaccttcctcaataatctgggacttgccccgaatacccaggcaagttcagataacacgcagcctggacaagccgacgtcgtctttgttgttgacacgtcttcgtccgctgggaacgtatcaggccggattgcgcagtatctcgatacattctccgaccgtctgtcggacggcggcagcatcgttcccaactttgcgatagtcggcacggacgggaccggcgcgcggattttaaagaacggcccgtccaactggtttaccgacgcttctgaactcagcgcaaaaatcgcggaactgaaccgcgcggaaaaaactccggacgacgcgcttgaagcggccggaaagctagattaccgcagctcggccgataaatttgtcgtcttggtgaccgattccggcttgcagctgcagggcaaaagcccggccgccgcaatgaaacagaagattgagcgcttctctgaaaaggggatttccgcaagcgttatgactacgccgagcaaaaacgcctcttataaggagctttaccagaagacaggcggcgcctacgcagacctcagcggaaatatgcgtacggaaatttcttcccttgccggccatatggcggacgaggtaaacgacggctgctgggtaatgctcagcaactaccagtccgtcaagctggacggccctgtttccgcttcgaacaaaatcgatacggacggcgacggcctgagcgattatgaggagctcggcgctttggagcgcagggacctttccgcattttcagatgacgcaggacaggaaagcgccctggtttacaccacgctttcaaacccggttgccgccgactccgactacgacggaatcgacgacgcgtccgatccgaaaccgctggacaatacgttctctggtacgcttacaacaagccaggcggcctctaccgtcaattattccatggattaccgcaggttctttgccaataacgaaacctacagccagccgctgagtaccgtttcctcgctgtggtcgtccgtcatttacgacggcgtcacgctcaacgtcggcgggtcggcaaaggctatcgccgccttgatgcagtatcacggcctgaaggatgtaaaaagctataagcttgctaattcatacagcgactaccacctttccgagcttgcaatcgggcacaggaccgtttcctataacggaacggaaaaagaaataatttccgtatcggtgagaggcacaaacgggacgcttcaggaatggtcgagcaactttgacatcggcgacccgaacgaatcgcctcagacggcagactggactgtgaaaacaaatcacaaaggctttgatattgccgcgacaaggctgctcaattacattaatacctacatccgcagctatacgtcttccacttcaaacaaagttctttgggtaacgggccattcccgcggcgcgggcatcgccaatatcctcggagcgcgcctgcagaacgcaggatactacaactatacgtatacctttgcggcgcctaataccacgaccgcctcaaacacggcgaactacaagagcatcttcaatgtcgttaacacagacgacttcgtcccgtgcctgccgatgacgcagtggggctttaaacggtatggcaggacagcgagcataagcgttgcgaaaaattatgagaaggaatgggaagcgcttgtctccaagtttgactataaccccgataccttcggtatgcagaacactgtcaacgatattgcggcagtcgctacaggcagaagcgactgctaccgttacacctgtaagtgccacggcgacggcagcaacgataccattaccatcatcaaccgcggcatgtcggaatcgagccgggagaaggcaatcgcaaaaatccctgtcaacgcgcttccgcactgtattattacccgttataacggcggattgatttccggctgggattttgaggtctgccagtcgcccagctacttcatgcagcttctcgcggcacagatgtccggtgaaatcaacgcataccgcttcgcggtcgagctgaatattgcgaagcgttatgaaaaggcaaaaaccagtatcatcgcttccgcaatcggcgggctcgcccacccgcactggcaggagacgtattacctcctgtccacgcacatcaattcttccaacttctaaacggaaaccgcagcccttgcccttgggtaaagcggcacagccaagccggctgtgccgcttttttgccttgtcaagcctgtacttgaccgctggaaggtggtaaaataaagaaaaatccagcacaggaggaataaaatgaacgcagctatatccggcaggaggagcataagaaaatacaaaagcatacccgtggaacgggaattgattgaacaggttttacaggcagggctttacgctccctcgtctaaaaaccggcagccctggaagtttatcgtaacctccggcaaggcaaaaaaagctttgctcggcgcaatgcaaaaagggctggacagggagaaaagcaaagaggcgctgctgccgggcagcaggcagcacctgggcggcgcggcgcacacattggaaattatggagcaggcgccagtcgtcgtctttgtaataaacccgctgggaatcggcctgtatgagacgctttcaccagaggagcgcgtatacgaaatctgtaacgcgcagtctgtcggagcggcgattgaaaacatgtcgcttgcggcggcagatttgggactcggaagcctttggatttgcgacacctattttgcttaccgggagctgaaggacagcctgaacacacaaggggagctatttgccgccgtagcgctcggctacgctgatgaagcgcctccgcaaaggcccagaaaatcattggaagaagccgccgaatggagactcggcgaaacagtataattcaaagccgtaccgcccgcgccggaaaacggcgcagaaggaattatgaacggtttgaaaagtttttgcctttcgccccaaatcgccgtttctctacttgaaccgccgctgctgcggtgttatgatagggtacgttatcaaacagaaaaaggagacttgccctgatgatgtggagatttcgggaattgcttgcccgctttatgtacgggcggcacggcatcgaccagttttccgtctttttaattgtagtttatcttgtaatcgcgcttgcgagcctgttcaccagaacgtatattattacaatcctggaactgcttctgctggtttattttgcctttcgtatgctgtcgcgcaatacggtgaaaaggtctgcggaaaacgcgcggtttttaaaaatctggagcgcagtttcttcgtggtttcacagggcctccgcacgtatcaaggaatctcgcacaagagtttaccacaaatgcccgaactgcaaggcgacgcttcgcctgccgcgccgcaaaggaaagcatacggtagcctgccccaaatgcgggaaggatttccagatgaaggtttggttcggcccgtcaaaaaaataatattttagtttctataaaaagaggctccgctgccaatgcagcggagcctttggttttacacgtttacatcaggtgcgtatcttcaatgcgcttttcaaaaaattcattgaaccgtatcagcggcctgcgcagcagcaaacccaaaaccagggcaaacggtacaaacgccagaagcttcagcaggtcgaaccagtaatccgcgccgtagggtcctgcgacagcctcgcgcatggcgttgataccgtatgtaaacggcaggaacggataaacgccctggaaaaactccggcacgacctcaaccgggaaggtaccgcccgcccctgcaatttgaatgacgaggaacacaacggcaagcgccttgccaatatcgccgaacgataccgttagcgtataaatgattaatgtaaatacaaagcttgaaacccagcccgcgagcataaacagcatcggctgggcgcactgaatctgcaggaagaacaaatcgcccaggcagataattgtcgactgtatcaggccaataccgaaaaacagcaggtacctgccgatatacgtggaggacggggaaagctttttcagctttttgtcctcgtcgacacgcaccttcaaaatcgcgacaagtacgataccgccgacccagatagcgagtgtagagtagaacggcgccatagcggagccgtaatttttaatcgggtaaacggactttgtcttgatttcgaccggggatgacataaactcgccaagccccttcgggtcatgggtaatcaaatcaaggatttccggaagcctgttatccgcctccaggccgttgattttatcgatggtcttttgaagcttttcgctgccctttcctaaaagcgcgctcgttttctcaagcgttttctttaaagaagcaagcgaggtgcccgcactgtcgagcgctccatcgattttcggcatatcgccgcctaccgccgtcaaaatcccggcaacgtcctgcattgtgccgtaaagcttatcggcggccttgtcgatactgctttttgccgaggttatatatgtggatttgatatcgtggaatgaagatttgctgtcagaaagcatggcgttgatttcgttttgcaaatcggccggcagctttcccgtactgcggattgtgccagccgccgccgtaagcttatcgatgattttctgctgctttgcgttttcgctttccagcttagagataagcttgctgttgtcgatacccagcttgtcggaaagctgctgcaatataccgataatttggttgttcatggaaacaatggattcattgaaagtaaccgctttttcaagctttgaggcggcagaatccgtatcggtttttaaaagcgcaaacgcttccttcaccgtatcgtctgcggaggtatagatggaatccattgaatcgatgatttcccccaaagcggcggaaacctgctgtgtcgcggcttttgaagcgccgaccgcatcttttacggagtcgtttaagccacctgccccgtccagcgttttggagataccgggcagaagcttttgattggcttccaacaaagcgtccatcgaatcgaccgtatcgcaaaacgctccgatagaggtccggaagctctcgatgtcatcctgcgcgtccttgagggaatccgtaattttcccgacgatttcccgctgcgtctgccccatgtcgtctgttgtcgcgttcaatatttttgcaatgctttcggttatcacgctgataaagctgctgtctacttcgctctgtattgcagaaattcccttgtccgtaattttgggcgcaatcgcgtttttcttttcgttgacgtaatattctatttgcgggcgcttcagctcgcccgtgacgatgctcgtcaggtttgcgctgaaatcctccggaatgacgaccgccgcgtaatattttccgctttccacaccgtttttggcgtcgttttcgtcggtaaatgtccagcccatctgtgtattctgcttgaggtttgtgacaatttcatcgccgccgttaagctcaagcgcgtggaggctgaagcccccgtccttattgacaaccgctaccttgataccgtcggtgcttccgtacgggtcccagttcgccgcgatattgaaccatgcgtacagagcgggaatcacgctgataccgatgacaatgacgagcgcaatcgcattgcgcgacagacgttttaaatcgcgtttgaatattttaaatacattcttcatgctttcgtttccccctgcgtacagcttgattccttgctttcttccgggctatgctcagggccgccccctgctataacgccgccctgtttttctccgccgccggccttcgtattttcaggcggccgcgccccgtttctttcactgcctgcttccggctcacgcctctccggccccacaagaggctgcggtccctcttgctcatccttgccgccggcgaccggctccttgtcgagcccaagcagcttcctataccagtaatccttgtattccacaacaatcaggaacactgcgaaggcgataatcgatataatccacagcgtcagaaaaaccagcttcgattccaggctgaacattaaaacaaggaaaacgattgggataataaaaatactcagcagcccgtattttatgtaccgcgggcgttttcggctgaattccccgtattgctcctgaagctttttgaaggtttggcgctcctggcacgtttcccgccctttgcccgtttccgaacgctgcgcttcccgctccgcattttgtatgtgcgcgcgttttgaatgcttgctcaaacgaccgcccccataaaatgataatagagggtactgccccctcagaaataaacattattttaacatatccatcctaaaatagaaagggcattcgccctgataaactttcgacttttcttacaatatttatgcagttttaagccaaccggtacacgcgcctgttttttcattcctgcgcgcatactaaaggcggagggatgctgtttgctgtatttgatatcttatatcccgcgccgcttggaaggcgatggggattcgccgtttattgacagggttgcaaggcttggggaaaccaaggagctgtttgaaggctgcgttttgctcaatagcgcttttacggcagttgggatacgccgccggctgatcgggcatatacgcgaggatgagattttatttattacgcaggtctttcaaaaccactgcgccggaaagctcaccggcgggcaaaaggaatttgtacgcatgcatttatgccccgacctgttcgggccgccgccggacaaaaagccatacagcttttaaacaggaaagcccgcggcaaaacaccgcgggcagatattcacgtctgctgcctgaattccttgggcgtcaggcggtacttgcttttaaaagcgcggatataatagcttgcgcttgaaaaaccggttttgtaagcaatttcatcgacagaaagctctgagcttatcaggtattccttcgatttttccagccggtaatcattaataaacttaacaatcgttttacccgtatagtcccggaacaccttcataaagtagttttcattataattggccatttccgcaagcctgcctatgtaaatatcctcgtcgtagtggccctgtatatattcgattaccccagtaatcgcggacacggtcttattagccgcctgtttgtggaaggtatagccttccccattgagaaacccaaaaaacagctcgaacaaaagcccccggaaccggatttggtaatagggctcctttcgtttaaaacagctgtacaaccgctggaaggtccctataatttcgctgtagtttttgctgtccggcgtcagcaggaaaggaaggataagctgcccgcagagcaggggatgcacaaatgtcttctggcaatattcctgagagggtccttttaaaatctccgggtcgaacaaaagggaaataaaacgggctgtctcaagcttgttcccagcgtgcttgacgctgtgcatagcgctgcgcgggacgcaaatcaaatcgcccgcgcctgcgagcagctcgttttggttgatacggaacaaaacgcttcccgtctgcacatagacgaattccatttccttatgccaatgcagcccgtagtcgctctgccggtgaaatacgctttcataaaaaacgactgggttttccgctgtgccgtgctccttaagctctcggaagtcgtcgtcaaaacagcatccgcccggctgcttcggatttaattttttttgttcgcgcatggcttttcacctcacgctgtgattatacaacaaaaaaataaacttttccacttacattaaaaaagaaaacaaatcgaattatttttaaacagatatacaaagagtccttaatatattcgcattcgactatattcgacaaagctcttcaacggaaagctgtaacataagcgccgtaatcgattacagactacttactgaaagaaggaattggaaatggttcgtaatatgaaaaagctcgcctgcggcattcttgctgtaatcatgctttccacactgtgcatggtaccggttggcgccgcaagtggaagcgtgaggatagaattctataagccggccgattgggccgactcagttaaaatccatctgtggaacgcgggttccgccgatacccagtggccggggaccgatatgacaaagctcaataacggcaattacctgttcgagacatccgtaacaggcagctgcgattttgtcattaacgacgaaaatggaaagcagacaagcgacctgcacgcagaaggccgcgtcaaggtaaaggacgatacggtaatcagctgcaatcgtacggaaggcattcgtattaactttaagaaaccggccggctggtccgacgatatcaaatactactactattacaaaaacggcgataaaaaagtctcttttaccgattggcccggagagtcgatgacaaaatacttagacgattcttactatacaagcatttatggtatagataacgcatgcgttatctttacagacggcacaaaccagttcccggcggctttccaggacggcattgctgtaaatagcggccaggagctgattttccaggacggtaagtacacggtcaacgaccataattggattcaggccgaccagcctacaaattattgcgtccagggagaaacctatacctgcaaatttataatggatgagggcagccatttcgacttgtatttccgcgaccgtgcgacaggcgaatttataagaccgaccggtgaaaaaacctttatcaaggataactataaggttaccagcgagtacagctttaacttctctgagactggagagaaaaatctggacgttctatattactatcactctggttacggccctaccgggattacgcttaacgtcagggtgctcgacccacagtataccaaggcaaacaccagcgtgctttattccgacaagtacgaccttacgctgggagaggactacgtactgacggccgcctacatttcggagctgacctataacttctataacgacgcgggcgagcagctcaccccgaaaaacatgtcttatatctatgaggaaggaagcagctggcctgcatatgttcagtaccatttctcggccggccagctcggccaataccagaaagtgcatctctacgcctataactggagaaacccaatccctcgggacacaggcacctttgtcacactgaacgtctgggcaaacgcctaacacacttatatcataaataatagaggagcgcctttcctgcagcagaagggcgctccttttttatatggaagccatttatatttctataaccgatttatataaaaatgtaatcgattataattatgaatattttattatttttaaacattcgactggattcgacgttttattgcggcgcgctccattatgataaagatgcaagaaagattgaaagtacaacctgtattggtttataattttgtctaaactttttcatgatagacctcttgggaccccctgttttttcagggggttcttgttgtaaaaatataaagggtacaaccttcccgccagtattatatgataggaagcattccaaaacgtcattcgggctatcgatacccaagccttctatcaagcacttaaatacatttcgctttattgtaacaacgatagcttaaatatgaatgaccccatttgtattataaagcaaaagccctgaaacctaaataggtttcagggctttctgttttggaggcgacacccagatttgaactggggaatcagggttttgcagacccatgccttaccacttggctatgtcgccggataaaaacggcgcttaatcaatattaagcgccttgttggagcggatgacgaggctcgaactcgctacctccaccttggcaaggtggcgctctaccagatgagctacatccgcaaaaaatatggtgccttcggacggaatcgaaccatcgacacgaggattttcagtcctctgctctaccgactgagctacaaaggcaaattggcgacccggaacgggctcgaaccgtcgacctctagcgtgacaggctagcgttctaaccaactgaactaccgggccattacctggtgggaacaacagggctcgaacctgtgaccctctgcttgtaaggcagatgctctcccagctgagctatgctcccttaaacctcttcgcggtgacctttgcgtcatcagcgacggttaatataatactatatcggggagcgaatgtcaatacaaaatttaaaatttttttattttttagattcgatgatttcctcgagctgtttcttggtaaaacggtagtttttgttgcagaaatgacagttcgccactgcgtagcctttttcgtcggcaaggcttctaatctcgtcgtcagataataaacggatggactcttctacttttcttctgctgcatgtgcagacataatcgatgggaaattcgtccagcacctcgacctcaaagccatcgagcgccgttttgcagatatcgagcgcgcttaagcctttggcaagcatcgtcgtcacaggttcaagctttgagacattcttttccaggcggtcgattgcgtcatcgccggccgcgggaagcagctggatgagcaggccgcccgcaagcaggacttcaccgtcctccttgtcgagcaggacgccgagcgcgcaaacagtcggtatttgttcgctttgcgcataatagctggtgatatcctccgcgatttccccgcttacgagctgcgtctgcccgaggtaaggctcaccgctgccatagtcgcgcataacgttgagtatgccgtgcttgccgactgccgccgcaacgttgagcttgccgtttacataatgctccgtttcgcaggcggggttttccacatagccgcggcaattgcccctgctgtctgctacggcaattacagcgcccagggggccgccgccatttatgcgaagcgtgacagatgcgttattctgcttgagctgcgcgcccattacggaagccgcggtaacaagcctgccgagcgccgctgtcgcgacaggacttgtatggtgcagcttttttgccgtgtggacgatattggaagaatcgatggccgaggccatgacgcttccgtcagacgtaatacatcttatgattttatccatgaaagtattcctgccttttttattctttgctgttttcatccatttatgaaagcttatgcgcaacataaacgttgcgctgcgaatcttcctttggctcgtcgaacgtaagctccccataaacggaaatggagccgaagccagccgtctcgagcattgcgcatagctccccgtgaggataagcgcgttcggaaaagctttccccgctgcgccggtaaagcgcgccttcgcgctcaaaaaaatcgagcgtaatatggacggtgtcccggtcgcggtcaagcgcgttctgccagacgcagtaaacgtccgcggtgtcatatataaaggtattgccgccaagtatttccctgtgcttgtaaacggtgttgacgtcaaataaaaagacgccgcccgggttcataaaaagagaaaccttgtcaaacgccttctgtacgtcgcttttgactgtcagatggttcaggctgtcaagcgtacagacgcaggtgtcgattgtgccgtataaatcaagctcctgcattttctggcgaaggaataaaatgtcaagcccttccccacacgctttctgctgcgcgatggaaagcatatcctgcgagccgtccgcgccgaatatgtcaaatcccagcctgcaaagctcaatagtcaggctgcccgtgccgcaggcaaggtctagcgtcagcccgggattatgcccgatgcgcccgagcagctccgcgatatatgccgcgcgctttttgtaatcgacgttttgcgtcaggccgtcataaaagccggcaaacgccgtatattttgcgctcatttttttaaatccccgtccttaatgcgcttaaaggcaagctcatagccgtcgcagccgtaaatcagggaacggtttaccctgctgattgtcgcggtgcttgcgcctgtctcgtgcacaatatcgctgtagacgcgcttttcactgagcatatgcgccacgacaaaacgctgtgacatcgccttgatttccggaacggtgcagaggtcctcgaaaaagctgtagcattcgtccatcgttttcagtgaaagaatcgccttgaacaaaaaatccacattgtcgtccttgattttggagttcatataaagcacctcttcattttttgcggcgcaccgcattttcatacgataaaattttatcataggaaagtgtaaaagtaaagacggccgcaaagaaaatcaaatagccgctgtttcccggaatatacgtaaaaaacaggcggcttttttagaaaaccgcctgttttttctgtttttatcatttataaatcctttttgatatgctcgagcgcgcccttttcgattctcgaaacctgcgcctgggaaattccaatttccgaggcgacctccatttgcgttttgcccttgaaaaagcgcagggataatattcgtttttcccggtcggaaagcgacgcaatcgcttccttgagcgcaatttcatcaagccaattgtggtcgtcgtttttgtcgccgacctggtccatgacataaatagtgtcgctgccgtcagaaaaaaccggctcgtaaagtgaaacaggctcaacaatcgcctcaagcgccaggacgacattttcctttggcatatcgagcgctttcgcaatctcctctaccgttggctccttattgttctgcgccgtcatctgctccttgacctgcatagccttatatgccgtgtcgcgcatactgcggctgacgcgtatggaattgttgtcgcgcaggtagcgcctgatttcgccgataatcatcggcacgccgtacgtggaaaagcgcaccttcaaggtacagtcgaaattatcgattgccttaatcagcccaatgcagcccacctggaacaaatcgtccgggttttcaccgcggtttgtaaaacgctgtattacgctgagcaccaagcgcaggttgccgcttatcatttcctcgcgcgcctttgcgcgttccttcggggttccgttttttattttttccagcagctccctcttttccgcttcttttaacaccttgagcttagaagtgttgaccccgcagatttccaccttgttgtattgcataaaaaaatccccctgacaacgctcttacttctctgtaagtattgccgtagtcccgggggttcatgcaattattttgttttaatcctccgcgtcctccagaagaagcgcttcgtcctccgaaagcttcgatacgccggaaagctttttctgaatctggcgcgtacgcacgccgacgagcttatccagctcagaattagcctggtcgagccgctgctgtgtaagcgttaaaatttccgcgaatttatcaaattccgttttgaccgcacccaatacgttccacacctctgcgctgcgcttctggacggcgagggttttaaagcccatctgcaggctgtttaacagggccgccattgtgctcggcccggcgatattcactttgtattccctttgcagcgtttcaatcagcccgcggcttaccgcctcggcgtacagcccttcgaacggcaggaacatcaccgcgaactctgtcgtattcggcgggtctatgtatttgtcacgaatatccttcgcctcattttttaacgtctggattaaattttttaccgcggactggatttcctctttcgagccgttttcctgtgcgtcgagcagcgaagcgtaggtgtcgcccgggaatttggaatcgattggcaggtaaataaacccatcgtcctccgccggaagcttcaccgcaaactctacaaactgacggctgccctttttggtgaccgcattttcctcatactgccccggggccaggatttcctttaaaatagagccgagctgtatctcacccagtacgccgcgcgtctttacattggaaaggacttttttcaaatcccccacgccgtttgcaaggctctgcatttcgcccaagcccttatatacctgctccagccggtcgctgacgagcgcaaaggaacgggtcattttatcctccagtgttttttggagcttttcgtccaccgtttggcgcatcttttcaagctgtttattgttatcctcctggatataactcaaccgcttttccaccgagctgcggattaggtcgagcttttgctcgttttcaagcgaaaaggttgtaaaccggctttccagctggctcaaacgctgcacctgatgctcgtcggatacccgctggttttccgaaatcatattgccgagcgcatgaaccgacccctgcgtcatcgcggtcagctcctggcgcagcaggctgttctggcgctccaaatcctgaagaagcccgtctagccggcccgtttcccctctttttttagagccgcgcagtaatatgataagcaggactaccgcaatacaaagcagcgcggtacatacggcgagcaggtaattttccattttaaaatcccccgttttatacagaacatctgttttgattatagggcctgccgattcaggtgtcaattgtttttagaaaattcgttcgattggttgatatttatcaccaatcattgaaaatccgtacccggtatggtatgctctctataaagaaagcaatagttcttaagaaggagggcgcgatatgtttgaaggaaaaagggaagacaggcagccgtcagcccctgtactgctcacaacagcaagggacgactgcgagcttgggattatccgctgccttttaaaggaaaacggcgtgccctttctcacgcgcgacagggagagcggcaattacatgcgtatcctgatgggttccaacattttcgggacggatatccttgtaaatcaggaggagtataaaatggcgcgggagcttctggatggaatttccgccccaaacgaagaataaacgattataaaaaacatcccgaaaccggagaaaacggtttcgggatgttttttattccgtctgcgccgtgggctgaaataagctttcaatcaccttatccgattcttttggagaatacaggaaacggtcgacatgcgcgccgtcataaaaatatttcggcggcgccggtttgtactcgtattcaaaggtgtcgatgacgattagcttgattttcatacgcgcagggatgatgttctttatgtatacgcttgcctgctgtccggaacggataccctcttttgtttccgcaagccccgcgaggtttggcgtaagctccacgaaggcgccgtaatcctctacagaacgtatgatacccgcgaccgtttcaccgggcttgaactgctgcgcgttctcttcccaggtgccgagcagctccttatgcgaaaggctgatacgccccttttcaacagtttttacaactgccctgatatccataccgacagcgaaccgttcagcaggatgctcgatacgggagacggatatcgtatcgattggcatcaacgaaacgacgccgcagccaatatcggcaaacgcgccgaacgtttccagatgggtgacgcgtgcgtctatcacgtcgcccgggacaagcctgctgatatattgctcaatacagcgctcctgcgcctgcctgcgcgacagaacggctgtcaggctgccgttttcgtcacgttcaaatccggtaataacaaaacagaccggcctgttcacacgcgaaatgaccgcaatatcgcgcattgttccttcacgtataccgaccgcgccttcttcgcgcgggataatccccttcatacaccccaagtcgacgatcaggttatgggaagaatcgcagatgaccgctctggcttccaggattttgccctcgctgtacgcttcgtttaagtgcgcctgtgatttgcatgcgtttaaattatcggccgtttctatcagccgtccctcaggataaaattctatcattttctttcctcccgtattctttgtagcggctaaaacattatatgccggcaaaagtggagaatataccagagaaatatcgggctgtgcccaaaaagggcatttgattttcccgatggaaaattatgaataaacattgcttgcattgcgggggacaatataataaaataatagataagacatttgaaaggaagctgaaaaatgaaaaataagattttgataaagggcatctgcgcggcgctcgtgcttgcgatgtcttccatcatgctgcttacggggtgcggggataacggcgcgtcctcaaacacacagacggctggctccggcacctcttccgcgaacgtcgcgctcgtcgattttaacgatatcggcatcgagcggaatatttatcacgacgaggagcacaaggcgggctaccagcttgaacagccggaaaagggcgagcaggtggcgattatgcatacgagcatgggcgatatttccctgcgcttcttcccggaggcagcgcctaagacggtggaaaactttattcagcacgcaaaggacggctattacgacggcctgaaattccacagggtcattgaagactttatgattcagggcggcgaccccaagggcaacggcaccggcggagtgagcatttacggggataaatttgaagatgaattttcggacaagctattcaacctgagaggctcggtcgcgatggcaaacagcggcgccgacacaaacggcagccagttctttatcaaccagaagccgaaggacagctttgagggctgggaaacgctcgaaagccaatggaagcaggtccaccaaatgctttcccagtatatcgcctccggcgcgctgcagtcctttatacaaaatatcaattatatcgcctgccttgataccgacgaggtgccggacgatgtaaaaaagctttatgcggacaacggcggaaacccgacgctcgacggcgcgttcaacgcaatcgaccgcggccatacggtctttgcacaggtttacgatggcatggacattgtagataaaattgccgcggtaaaggtcgacgacaacagcaagccggaaaaggatattattatcgacagcatagaaatcacaggcttcggcggctgacagttatcataaaaggcaaaaaagcggaaacgataaggaaaaggaataaggaggatttgttatgtctgataatattatgcatcccacggaatcggatttcgattccatgataagtgaaaacaagcttgtagtcgttgacttttgggctacctggtgcggaccgtgtaaaatgctcgcgcccgtgattgaatctctcgccaatgaatttgaaggcaaggcggtcgtcgccaaggtagacgtcgaccaggaaaagggccttgccaaacagtttggcgttatgagcatcccgactgtcgtcattttcaaagacgggcaggaggtaaaccgcgaggttggctttaagccagttgacgcttaccgcggaatcctgcaaagctatctttaaatgtagtataaaaaacggcgtgccaaatcatggcacgccgttttcttatttcaattgttattctaaccctcctgaatgggcaaccacgtccacggaagctgttcacccgccaaaatccgctgtgcaagcaatacgtccaccagcgtgagctttccgtcatggttcaggtcgcaaagctccttgacataaaactcgttttcgctgcccaaatacagattttccatctttaaaatctgcgcaagcaccttctgcatggttaagacatcggtaagcataagctctccgtccaagtccgtatccccaagcgggcgcgcctctaggccgtagccgttttgcacgggaaacatttcggcaatttcttttatatttgttacaattcccgtttgatacgcctcccaaagcggaacagcctcctgcccctgaatcaggaaaatacccagttggtccggggtataaagtgaccggttaaaaaatttatagttcccgatttgcgccgtcatttccattggtgtaggttcaagagcggcaaggcaaacggcatatccgtttgtttcaccataagaggaaaacagatactgtcccccatacgcgtctatcgctttccgtgtataaccgtaccggtcgatcaggcactgttcaaatacggctttatattcttccgcagtcgcctcctgcgcatttgcagaaattgcaaataccgccggtatgaacagcacggttaaaaacagcgaaattactctttttatcatgacataacatctccattcagtgccgtaatggcaaaataggccgtatggccggacgggccgttcctgctcaccttgatatggtaggtaccgttttgtacgtttgttggtggaatggaaatacgctgcacattgcctgtaacattaaatgatgtgtacaccgtaccatcaggcgccgtaacctctagcttaagaaaggaaaggggcgccccgctcaaattgacgtccgcaaaatgatcgcttatactgttaaaagaagttgttttcgtccaagtaagcgcgatattcaaaggtacatttgattttgtcacgagtaaattttttgtcacggggccgaattcgctatgcacaaaagaaccggtcgcatactttgggtagctgctcgaagatagcgcagtaaaggaattgtagacgtttaacattccggctccgcactggcgtgtcatcgcaggtgtgttggaagttatagaagaatatgccgacatttccgtcgcgccgcacagcaaaagcgccttgacaagctccggattcgttttcaaaaaaggctgcgcctgcatcagttgcgcgatagcacccgttacgacaggtgcagcagcacttgttccgcctcctgccatactaggagctgcagatgttgtaacacaagagcctggagcgataagatcaggcttataaggcttgctttcgtctgcacaatatgatgaagtacttgctaatgtatcatctaatagcgattctgttttcttgtcgtctaaatttcccactgtaatcgcattataagccattccaccgcaagcgacgcctgctgggtcaaggtttcccgaagaaattactattgcgacatgatgatcaacactaatatgatcaatccattttgtaatgtctctgtactgattaaaataatgatcatttccagttgggtaattatcatttatcacaccaacatatttgtattcaaaatatgcactagcattaattacgtttaccccttcactcagaagggtttctatcgcctgtttataaccttgtccttgattggatgaagcatatagctctgcttcagggacaattccagtataattttgagttttgcctatcataatactggcaacatatgaaggatggtctgtagctgttccatttaaaatatgtattttattgttttctttagcatattggaacgataataaatcatcatttaacaccccagcttcaacctgtcctatcttaataccagaaccattttcccagaacatcgcgcatatattctattcctgtaattttttgccacacaactggtattgaactgtcaggaagcgatacattctgctgttcattgatttctatttgctccagttgggattctaaataataattttcatctgcaggaagataaaatacagcttccacatcatttgaagcgacaatattataaatctgcactttcgtaagcgttatatctatattgggcgcatactggcatgtatagagaatttcaggctgttcagcggcagaagcgcgaaacaattcttgtttttcttttggaaacagcgcgtcaaaaatatccatattttgtttttggtagaggctggatgaaactgtacgctgtgtctctaccaaatattgataatcatctgatgaaagcccaagagacgcctgctccatttgctctaactcggtcataaggcttagtgtttttgcgttatcaactgctaaatcctgttgctccatgtattttaataatttagcctttttatcttcgttttttacttcttttttgatgcattgttccactgcagatgtcattgtttcgccgttaatatcccttacccatacagacacgttaaacttttctgactcctttgccgctgtaagcttttgcagcaaaaacgagtcaatcttcttttcattgccatttttatacacctgtaacgctgtgacagaaggacaaaaggctactaaccacaatagtagcaaagctaaaagtatcgatattcttttctttctcacatgaatacttcctttcctgctttttatcagttcaataaacaattggacattggtcttcctcctctcgaaagcttttatttattttactatatttttctttattaatcaaattatttaatgaatttttaatattgcagctttaaattgaagctataaaaattcctgtttagaaaactttcattatttaaaattttatgaactttttgcatcaaacccgtttaattcctgcaaaagattgacttttttcataaattagtggataatataacgtgttaaattattaacgtgggagcctgtaagcctgcgcttcccacctgttacgaattgaaaaagaaggaggagattatcttgggctacactcttgcacaaaagataatcaaagaacacctgctcagcggcgatatgaccgtcggcagcgatatcggcctgaaaatcgaccagaccctcacgcaggacgcgaccggaaccatggcatatcttgagtttgaggccatgggtgttccaagggtcaagacggaaaaaagcgtcgcatatatcgaccacaatacgctccagacaggctttgaaaacgctgacgaccaccgctttatccagtcgatcgccaaaaagcacggcatttacttttcccgccccggaaacggcatctgccaccaggtgcatttagagcgcttcggcaagccgggcaaaacgctcattggctccgacagccacacccccacgggcggcggcatcgggatgctggctatgggcgcgggcggcctggacgtcgcggtcgctatgggcggcggcgcttactatatcaccatgccgaaaatggtgcgtgtaaaccttaccggcaaattacagccgtgggtttccgcaaaggacgttatattggaagtgctgcgcatcatgtccgttaagggcggtgtgggtaaaatcgtcgaatacggcggagacggcgtaaagggcctgagcgtgcctgagcgcgcgaccatcacgaatatgggcgcggagctcggcgcaacggcctctattttcccttccgacgaaattacaaaggccttcttgaaggcacagggacgcgaagaggactggtgcgagctccagccggacagcgacgccgtatatgacgaggtaatcgatatcgacctctcttccctcaaaccgatggcggcttgcccgcacagccccgacaatataaaaacgattgaagaaatcggcccgcagaaggtcgaccaggtatgtatcggctcctgtacgaactcctcttaccttgacctgatgcgtgttgccgctatattaaaaggaaagaccgtgcacgaggatgtaagcctttccatcgcgcccggttccaagcaggtttacaacatgcttgccttaaacggcgcgctcggcgatttgattgccgcaggcgcaaggattctggaatgtgcgtgcggcccgtgcatcggtatgggacagtcgccgaattccaagggtatctctctgcgtaccttcaaccgcaattttgaagggcgctccggtacggcggacggccagatttaccttgtcagccctgaaacggcggcggcaagcgcacttaccggcgtatttaccgacccgtgcacactgggcgaagaggtaaaaatagacctgcccgaggcgttcctcatcaacgacaacatggtaacgccgcccgcgctagaggaagagatggacagcgtagaggtcctgcgcggaccgaacatcaagcccttccccacgacgaagccgcttgaggaaagaattgaggcaccttgtgccttgaaggtgggcgacaacataacaaccgaccacatcatgccggcgggcgcgaagattcttccgctgcgctcgaatatccccgcgatttcgcagcactgctttaccgtgtgcgacaaggaattcccgaagcgcgcgcaggaaatgaagcagagcgtcatcgtaggcggcgcgaactacggacagggctcgtcaagggagcacgcggcgctcgcgcccttatatctcggcgtaaaggcggtgctggtcaaaagctttgcacgtatccaccgcagcaacctcatcaacgccggtatcttgccgctgacctttgcaaacgaagcggattacgataaaatttcacagggcgacctgctttccatgccggacgtgaaggcttgtattcagcagggccgcgatattataattgaaaacaagacgaccggcggcaaaatcacggcaaaatgcgagctgaccgacaggacgaaagcgattatctcagccggcggcctgttaaactacacgaaagaaaacgcctgattttaaaaccgccctttccgggcgggatacataataaaaaaccggcgggcttagaaaatgccggttgacccggctgcatcgggacaggaaatcaatagaaacaggagtgattccattggcagacaaaatccaaatgaaaacccctctggtcgaaatggacggggacgagatgacaagggtcatctggcagatgattaaggatatccttcttaccccttacatcgatttgaacacggaatattacgatttggggcttaagcaccgcaacgagacaaacgaccaggttaccttcgacagcgcgcaggcgacgaaaaagtacggcgtggccgtcaagtgcgcgaccattacgccgaacgccgagcgcgtcaaggagtacggcctgaaggaaatgtggaagtcccccaacggtaccatccgcgcgattctcgacggcacggttttcaggacgccgatagtcgtcaagggcatcaccccgtttatccccacctggaaaaagccaatctgtattgcgcgtcacgcgtacggcgacgtatacaagaacacggagatggcggttaagggcggcagcaaggcggagctctgcgttacagcgcccgacggcacggagcagcgccagctcatccatacgttcgacggagacggcgttatccagggcatgcacaatctcgacaagagcattggcagctttgcgcgttcctgctttaactacgcgctcgacgtacaccaggacgtatggtttgcgacaaaggataccatcagcaagaagtacgaccaccgttttaaggatatattcaacgaaatttttgaaaatgaatataaagaaaaatttgaaaaagccgggattgaatatttctatacactgattgacgacgcggtcgcgcgtgtcgtccgcagtgagggcggctatatctgggcctgcaagaactacgacggcgacgtcatgtccgacatggtagccaccgcgttcggcagcctcgcgatgatgacgagcgtgctcgtctcccctgacggcgtatacgagtacgaggcggcgcacgggactgtgcagcgccactactataagtatttgaagggcgagcagacctccacaaacagcgtcgctacgctgtttgcgtggagcggcgcgcttcgtaagcgcggcgagctcgataaaacgccggagctctgcgcgtttgccgataaactggaggcggcgacggtccagacgattgaggacggcgtaatgacgggcgatttgtacctgctttcctctctcagcaataaaaagaaggtcgatacggaaacgttcctgaaggaaatcggcgtcaggctttcctccatgatgtaatattgtcttaattcagccggacggttttcccgtccggctgaagcggcataaaatacttgcggatattctcaaggcagtttgattgagctgtttttagaatggctgcaggaaaaagatgcaggaagaaggaaaagattatgagcaaaagggaaaacatttcgatgtcggtcgtccgccgcctgccgcgctattaccgctttttgtcagagcttaaaatgcagggcatcatgcgcatttcatccaaggagctggcagaccggatgaagcttaccgcgtcccaagtgcggcaggatttcaactgcttcggcggcttcggccagcagggctacggctacagcgtggaacagctttatgacgagattgaaaatatactcggcctgcagggccgtcataagacggtgcttatcggcgcgggcaaccttgggcgcgctgtagcgacgcatatgtcttttgagacgcgcgggtttgagctgattggcattttcgaccgcgacaaaacactcataggccaggaaatccgcgaggtactcgtcggagatataaaaaacctggagcagttctgtgagctgttccgcccggaggtcgcaatcctctgcgtaccgaaaagctcggttgagccgattgcgaaaatcctgtacgcgtccggaatcaagaactactggaatttcagccattacgacctatcagtcgcttacgacgacgtaatcgtcgagaacgtccatatgtcagacagcctgatgacgctctgctaccgcatcaacgcggcgcagcagcaggcaaatattgagccttaatgcgggcataataaccgttagattttccggcgaattttttgtacaaaaaattcgaaaaaacgcgccggattttttataagccaaaccgtaaaaaagtttgttaatttattgacaatccataagcccaatggtatactagggtcaatgagattgttaatcttttaacaagtcttagaaaacaggaggtaactgaaaatggcaaaagcacaagaaaaaccgcagcagaacaatgtagccgaaacgattgacggttatgttgcgaaggcgcagcaggccctggaggagtatatgaagctcgaccaggagcaggttgacgcaatcgtaaaggcgatggctcttgcgggcctcgaccagcatatgccgcttgcgaagctcgcctatgaggaaacaggaagaggcgtgctcgaagacaaaatcatcaagaacatgttcgctaccgaatatatctggcattccattaaatacgcgaagaccgtcggtattgtggaagaaaacgaaatggaaggctatgtggaggtcgcggagcctgtcggcatcgtctgcggcgtaacgcccgtaacgaaccccacttcgaccaccatgtttaaatccatgatttgcgcaaagggcaggaacccgattatcttcggcttccatccgagcgcgcagcagtgttccatcgcggcggctaaggttgtaagggacgcggctgtcaaggcgggcgctcctgaaaactgcatccagtggattgaaacgccctccatcgaggcaaccaattacctgatgaaccatccgggcgttgcaatggtccttgcgacaggcggctccggcatggtcaaggcggcgtattcgaccggtaagccggcgcttggcgttggcccgggcaacgtgccctgctacattgaaaagagcgcgaacctcgagagggcctgcacagacctgatgctctccaaaacgttcgataacggcatgatttgcgcctctgagcaggctgttatcgtcgataaggaaatcgcgaaggattttgaaaggattatgaaggacaacaactgctacttcctcaacaaggaagaaacagagaaggtctcgaattacgttatcaacccggaaaagcaggcggtcaacccggttatcgtcggcaagccggcggcatggattgccgagcaggcgggcgtaaaggttcccgacaagacgaagattcttatcgcgaagctcccgaaggtcggcccggaatatccgctttccagggaaaaactctcccctgtgctcgcttactttattgtggacagcaccgagcagggcttccagtatgccaacgatatgcttgaaatgggcggcctcggccactccgctgttatccacagcacaaacgcggaaattatccaggcttacggcgaggcgatgcgcgtcggccgtgtaatctccaactctccgtcctcgcagggcgctatcggcgatatttacaacacgaacacgccgtcgctcacgctgggctgcggctcctacggccacaactcgacgacatccaacgtttcgagcgttaacctgattaacaagaagcgtattgccaagaggagagttaatatgcagtggtttaaagttccgccgaagatttactttgagtatgattccatccagtaccttgagaagatggaaggcattgagcgtgcgttcatcgttaccgacccgaccatggtccagctcggcaacgtcgataaaatcctttactacctgcgcaagagggagcagtactgccacgctgagatttacagcgacgtagagcccgatccggatgtagagacaatcatgcgcggcgttgaggcaatgcgcaccttccagccggacgtcatcatcgcgctcggcggcggcagcgcaatggacgcggccaagggcatgtggctgttctatgagcatcccgacaccacgttcgacggcctcaagcagaagttcatggatatcaggaagcgtgcctacaagttcccgaggctcggcgaaaaggcacagatggtttgtatcccgacgacctccggtaccggttctgaggttacgagcttctctgtcattacggacaggaagaacggcaacatcaagtacccgctggccgattacgcgctcaccccgagcgttgcaatcatcgacccgcagttcgtcacctccctgccgaagtccgcaaccgctttcaccggccttgacgtcttgacgcacgcgattgaggcttatgtctccgttatggcgagcgactacaccgacggccttgcgctccaggcaatcgatatggtattcacctatctgccgagagcctacaagaacggcgcgactgaccttgaggcaagagagaagatgcacaatgcttcctgtattgccggtatggcgtttacaaacgcgttcctcgggctcaaccactccatggcgcataagctcggcggcgagtaccacatcccgcatggccttgcaaacgcgctgcttctcccctatgtttgccagtataacgcgcagaagcccacaaagtttgcgaccttcccgaaatacgagaagttcatcgcggacgaaaagtttgccaagattgccaagatgattggcgtaggcggcaagacgacagaagaaagcgtgaagaacctgattaaggcaatcagggatttgaccaacgaggtcggcattgagtttggtatcaagaaccagggcgtcgacgagaaggtattcttcgatacgctccagtcccttgctgagcgcgcgcacgaggaccagtgcacaacagcgaacccgcgctacccgctcatcagcgagattaaggaaatctacaccaaggcttattacggcgaagagtaatccgcataaattcagttttcagttttctacctcccttctatattgcagcagcgcaccggaacccggtgcgctgctttttttgcggattttaataaatccgcgctttttcttgaaacagcctgcttcctattcctttttaaagtatgctgcttcttgtttttttgaagcatcctgcttctctctttttatttgaaacgtgccgtttctttttatgaagcatactgcttcttggattttttcataaaacttctatgctccatcaaaagggaaaaacaatccgctgtttttcccttttgtaaacccttttcgtcggtacaagggaaccctttcgatgggttcccttacggcttacgggcggcaaagcatcgcgccgccctccgcctatccctccgcagccgattcaaggagcgaagccccttgaaaatccccctaagacgaaactatccgttcctcgttttaagtctgggggcgtagaacagatactgcgggacgcttcagtgccgcgccttcgcgcggagtacttcgcggatgcggtactttcttggcgctcggcattcctcgttggatgagtacatatgagcgcggagtttttcatgagtgcggtactttgtacaattacagttcatttttctgtttcatccgctttctttggttcaagcggatgaaacaattcagaaggctttaatccatagaaattgcataccgtcataaaatgttcaacaccaaaatccccgctgctgtgctccatttccctaagcacaacaggtttcacccccgtaagctttgataactgcataatcgttaatccttttcccaagcgcagctttttaaagttctttgacataattctcaattcctcgtcaatatcttttaatttttccatgcttatcaccccataagaaaagataactgcttttgatagaaaaacaagtcatttaaatcctcatcttttatttttctcatttactccccttttgcagcctgttatgattatacattgtatttagtctgatacataaataaacgacataatgttgtgtgaaatttattcaattgttaacaaaacgtaaaaagtaccgcacccgcgaaagcgcggcgcagagacatcccgtactttttctcctacacccccagacataaaacgaaacggatagttatctcttagggggattttcaaggggctttgctccttgaatcggctgtggagggataggcggagggcggcgcgatgcttcgccgcccgtaagccgtaagggaacccatcgaaagggttcccttgtaccgacgaaaagggtttacaaaagggaaaaacagcggattgtttttcccttttgattaaaacatataaagttttatcaagaaatccaagaagcagaaagctttattcaataaaaaagaaacgggacgtttcaaataaaaagagagaagcaggatgcttcaaaaaaacaagaagcagatggcttcaaaatgcaaaaaaagaaacgcagcgtttcaaaagcagaaaaagaaacgttacgttcgataaaaaatgaaaaaagataataagagaaccttaaaaaggttctcttatagcaaagcgcctagctccaacaaatcatcgataacgggaacgccggcggtcagcaaatccgccctcccctggtgccccttggcgagaagcacgcagtctgtgccgagctgccgcgcaacggtataatcgtgcaggctgtcgcctacaagcaccgccctttcgggcgcaatacgcaaacgctccagcacctgcctgccgcgctgtgccttgcaagaagcctcgtaatcgtccgcgcccgatacgcagtcgaaataatgcgcgatattaagccggtttaaggactttgcaatctcttccctgtgggatgaggacaatatcacctgctttagctccatgtcgcgcgcaagcgccaaaaccagccgcgcgtttgccatcagcggttcttccggtaaatgcttgtcgtagccctgcgcgaattcccgcgcgagcgtatcgaacggcacctcgttcaaatcgaacaggcgttcataaaactttgtaatcggcgtgccgatgtagctgtaatactgctctattgtaattggctccatcgaccgccttcgcaggatatcgttaacagacaaaagcgccgtgtgcacgtcgtcgataagcgtgccgttataatcccatataatcgcgctgtacttcttttccatattgaatcctttcaaaaaatccgccggttttccggcggattcattttatcagtcaagcagcattttatcggtaaactcgtcgtccgcattggccgaatagagcttcatcagctcaggtacggtcatctgctcgcgttcttttccctcgagaatcagcacaattttacctgcgctcatcacaatcgtcttgttgcccgtgtggagcgcgtccttaatgttgtgtgtgaccatcagcgtggtgatttggtgctcgccgatgattttttccgtcagctccatcacctggtttgccgttttagggtcgagcgccgccgtgtgctcgtcaagcagcagaagctttggcgtaacgatggtcgccatcaaaagggtaagcgcctgccgctgcccgccggaaagcagcccaacctttgatttcagccggtcctccagccccaaatcgagctgggacaggatttcacggaacatctgcgcgtcctgctttttgatgcccatggaaagccccctccggctgccgcggctgtacgccagggacaggttttcctcaatcgtcatattcggcgcggtccccttgagcgggtcctggaacagccgcccgataaaacgcgcgcgcttgtgctccttctggcttgtgacctccgccccgtcgagtatgactttaccgctgtcaagcgtataggtgccggagattgcgttgagcatcgtcgatttgcccgcgccgtttgaaccgataacggtcgcgaaatccccctttttcaggtggagcgatacatggtcgagcgccttgcgctcattgacggtccccgcgtaaaaggtaatggaggcgttatcaagcttcagcatgtctcttcctccgtttctttacatttgctcccacaatcggtacggcaagcgcaatcgccacaattaccgcggacaaaagctttaaatagctcgcgggcataccgagctggaatacgaccgtaatgacgacgcggtaaaggattgcgccgaggatagccgaaacgatgttattgagcacgcttcgccttccaaagatggcttcgccgatgatgatggacgcaagcccgatgacgaccataccggtgcccgccttcgcgtcggcaaagttctggtcctgcgcaagcaccgcgccgctcagggcgacgaggctgtttgcaatcgcaaggccgagtattttcatcgcgtcggaattgattgacgacgcgttgaccatctcgacattgtcgcccgttgcgcgcagggacatgccaagctgtgtctttaaaaaccaatacaggataatcgtcacaacgaccagaaccagcaggatgattggcagcacgcccgcctttttcattacactggtaagctccggcgcccacgactgcgcggcgttcagcagcggcgtgaaaatggtatcctgcccgaacacggaaaccgtcgggttatcgcctaaaatcatcaggttgatggagtaaagccccgtcatggtgaggatgcccgccagaatcggctgcaccttgagctttgtatgtaaaagccccgttatacagcccgcgagcgcgcccgccgccatcgcggcgaaaataccgagcacgggaagccccgcctgcgttaccataatggaaacggctgagccggtgataaagcttccgtcaaccgtcaggtcgggaatatcgagtatgcggaaggagacgaaaatccccaccgccataattgcgtaaatcagcccctcctcaagcgagccgaggccaagcgttaaatattgcatgggcggtaccgtcctttgctgtaaattggacaaacgccgcggcaagccgtttgaaaaggataaaaagaagaagcctcaagcggtttgccgcagcgttatgagtaaacgggaggaatcccaagcacagggattcctccgtttctctgtgttatccctgcgggaatatcacagttttatcattctttaaaatgctttccgggatttccacgccgatggccttcgccgtgtcggtattgacataggtgctcaagtcgtcaaacaccttaatggggatatccgaaacccgcgcgcccttcaaaaccttgtcggccatattcgccgtttcaataccgaggtcctcgtacttgatgccgatggttgcaaagccgccgtcctttaccatggaatccgcgccgacatagcaaggaatcttcgcgtcctttgtaatctgcgcaagcactgtcatcgcgtcggcaaccgtgttgtcggtcggcgtaaaaatggcgtcgcatttcgtcacaagcgactgcgccgcctgctgtacctcggttgaggtggtaacgcccgcttccacgtatttcagcccgtttttatcgcagtattcctttgccgcggcaatgttcgaaacgctgcttgcctcgccgttgttatagagcaacccgagggtctttatgttcggcgtaagctcaagagccatgtcgagaatgcgctctacaggcactgcgtcgctcgtacccgtaacgtttttatcgggcttttccaggcttgtggtaagctttgtcgcaaccgggtcgctgaccgccgagaacacgacgggtacctcgtttgcaatattgagcgccgcggaagcaaccggagtcgtgatggcaatgacaatatccttgccgccggacacgaaattgttgagtatcgtcgtgacgttcgcagcctctccctgcgcggaaagcgcctcgatttcagccgtctctccgtccttgtagccgagctttccgagctgctcgattgtcgcgtcgcggatggtgttcagggatgcgtggtctgaaatctgcacaatcccgattttctttttctccccgtcctgggaagccgcgctgttggcggaagaaccgcctgaggaagtattcccgctgtccccgcagcccgcaaggatagccgtacacagtaaaagcgccagaataagcgccgcaatctttttcatgttatgttcacctctgcaatatgtatgggtcagcccttgtattccatgccaatccggatggctttccggttcgcgtcgagcaaatgcgccttgctcttcggcacgctcttctggattgccctgtcgagcgcctcgtccgagcagaatgcggtttccttaaacagcttgccgacaaggataatattcgcaagccccttgagcccgttttcctccgcgagccttgtcgcggggacataaaaaacgttcacatcgccgcgttcaatttttttgtcaatcaaaaagctgtcgatgatgaccgtcccgcccggctcgacgctcccaataaatttatcgagcgacggcaggttcattgcaacgagcacgttcggcgtgagcaccaggggggaaccgaccggcgtgtcgctgatgcagacgctgcagttggcggtgccgccgcgcatttccggcccataggagggcagccaggaaatttccttttcatccatcaggccgccgtacgcgatgaccttgccggcgaacaggattccctgtccgccgaagcccgcaagcagcatattataattcttactcatttgagccttgcccccttctcctcatccttgtaaacgcccagcggataatacggcagcatgttctcccgcagccagccgagcgcctcaacaggcgacatgccccagtttgtcgggcaggtcgaaacgatttcaatcagggaaaagccctttttgtctatctggttctggaagccctttttaatggcttttttcgtttggttcacgttcttcacgcagtcgaccgaggtgcgctgtgcaagcgccacgccgtcgagcgtcgagagcagctcgcatacgcggattgggtagccggctgtgtttacgtccctgccgtagggcgtggtctgcgtgacctggtttggcagggaggtcggggccatttggccgcccgtcataccgtaaattgcgttattgatgaagatgacggtaatgttttcgccccttgtcgccgcgtgaacggtttcagccgtaccgattgccgcaaggtcgccgtcaccctggtaggtaaagataatattatcgggctttgcgcgctttagccccgtcgcaacggccggcgcgcgcccgtgcggagcctgcaccatatcgcaggaaaagtaatcgtaattcataacggcacatccgaccggagcaacgccgactgtgataccctcgatttcaagctcatccatgacctctgctatcagcctgtgcacaataccgtgcgtacagccggggcagtaatggaacggcacgtctgtcagggatttcggtttttcaaaaacgactgccattactctgcacctccaagcttttcaatttcattcaaaatttcagcgggggtcggtataacgccgcccgtcctgccgaagaaggtaacggggcgcttacattcgattgcaagcctgacgtcatcgaccatctggcccatgctcatttcaacgcaaaggaagctctttgctgtttttgccgccttcttaagcgcgtcagtcgggaacggccagagggtaatcggccggataagcccgaccttcatgcccttttcgcgcgcgctgtcaaccgcgctgtgcgcaaccctggaggatgcgccgtacgcgacgacgataatatccgcgtcgtccgtcaaatattcctcggcccgctgctcgttttccttgacgacctcataacgcttgaagcgctcaatagagagctgctccagcgcctgcggggtaagatagagcgaattgatgacattatgctcccttttccccttgtggccgtcggtcgcccatggcttttcgggcaggtctgtacggggattgtcgggaatttcaaccggctccatcatctggccgagcataccgtccgccagaatcatggcgggcatacggtacttgtctccaaggtcgaacgccgtgccgacaaggtcgaccatttcctgcacggtagccggcgcaaacacgagcacctggaaatcgccgtggcccggcgctttcgtggcctgccaatagtccgcctgggacggctggattccgcccagtcccgggccgccgcgctggacgtttataatcaaggcgggaacatcgctgcccgccatataggaaatcgcttctgtttttaagctgatgccaggcgagctggagctcgtcatcgcgcgtacgcctgcgcttgccgcgcccagtaccatattcgccgcggcaatctcagattccgcttgcaggtatgtaccgccgattttcggcatccgcttcgacatataggcggcaagctccgtctgcggggtaatcggataaccgaagaaatgcttgcaccccgcctggatggcggcttcagcaagcgcttcgttgcctttcattaaaaaccgttctgccattgtgctgttcaatcctttcctgggccatgcgccccttatctttctactgtaatggcgacgtcggggcacattgtcgcacaggatttgcatccgatgcactcctccggcttcatcaggcgcgcgggatggtagcccttcgcgttgattttgtcttttgtaagggcgatgattttcttaggacatgcgtaaacacacatcccgcagcccttacatacgtcttcgttgacgatgattctcggcattgatattcctcctttaccggttctctctatttaaaatatgattgttttctcattcaaacggcggcctgacgattacctcaacagggtaaagcccttcaatcttcccttcgagctcctgcgccacgtctttcggcgcagtggtcataacaagcggaagggaaagcgccgccgcggtccgctgcgcgtaagcggcggaggccaaaatatcctccgcggtggtcagcccctgcaaatgtgaattgttgataatacccgtcgctttgacgcgcgaagccgcctctatttcggagagcatcccggccgcctcctgcggagattgggtaagcgcgcggtatttgttgacgacgtaatacgcctcataatccgcaaggctttctatctgcccggcaaaacgccccagcgcgtacgcgcccgcgtcgtccccgccgatatccattatgacataccggccggcctggttaaaaaccgaatagatttccgccggcagagaaggcaggtcgaggttggtgcccgcaaactgcgggcttacaacctcaacgtccagcccttcaaacagccctttatagtcgctgctgcggaaatacgggtttacaatgtccaaatcgacaagcgttaccgggtttccttcccttgcaagcataagcgccaggtttaacgataaattcgttttgccgcagccgtaatgcccgtatatgatggtaaatttcttacatttaaacatgtgtgaatcaaactctttccagagcctgcctgaagtccccgattaaatcgccgatgtcctcaatgccgacggaaaggcgtatcatgttcgggctgatacccgcttcctcaagctgttcgtcgttcatctggcggtgcgtcgtgctcgcgggatggagcacgcaggtacgcacgtccgccacgtggacgacaatcgcgccgattttaagcccttccatcagcttttcggcggctttcctgccgccccgtacgccaaaggagatgacgccgcagctgccctgcggcatgtacttctgtgcaagctcgtaatatttattgtctttaagccccgggtagttgacccattcaattttatcgctctgctgtaaaaattccgccagcttctgcgcgttttcgcagtggcgcgccatgcgcaggtggagcgtttccagccccaaattgagtaaaaacgcgttttgcggggacgcctgcgcgccaaaatcgcgcatcaggtgcacgcgtgcctttgcaatataggcggctgggccgaaatgctcggtgtatacaacgccgtggtacgtatcgtccggcgtcgtcagcatggggaattttccgtttttccaatcgaatttaccgctgtccacaaccacaccgccgagcgcgaccgcatgcccatccatatatttggaggtggaatgcaccacgatatccgctccgtgttcaaacgggcggcagtttataggcgttgggaacgtgttgtctacaatcagcggcacaccgtgcgcatgcgcgcagcgcgcgtacatctcgatatctgtcacgacgagcgcggggttcgcaaggctttccgtaaagaccgccctggtgttttccctgaatgccgccataatttcctcttccgttgcatccggtgccataaaggtaaactcaatgcccagctcgcgcagggttttatggaacaggttgaacgtgccgccgtaaaccgcgcttgcgcagacaacgtggctgcccgcgtggcagatattcgtaacggaaataagcgaagccgcctgccccgccgaggtgagcatcgcgccgacgccgccctcaaggtcggcaattttcttttctaccgcgtcgagcgtcgggtttgcaaggcgcgtatagaaaaagccgtcctcctccaaatcgaagagctttcccatggtttcggcgctgtcgtatttatatgttgtgctctggcagatgggaacgaccctggactgcccattctgcggctcgtagccggactgcacgcattttgtattgatatggctcattatagtatacctcctgaaaatcagaataattctttgaccaggccagtgatgaaatcggtgccgaagacgacgagcgaaaccacaataataaacagaattacggaaacaatacgaacgacgtttcgttttgtacggctcatctcttcccattggggttctggctttggctctttttcttttcgtttctttttgccttttttcttttgctgtaccggcgtatggctgtattcaaatgttttcgtaccgctttctaatgccccggagggcatattgccgttctccagcaccttttcccccgcgagctttaccgcgccgattccgactaaaatgtcccttgcctgctctaaggctgcaaagggaacctctattttcaccttcgccgcaagcttgcccgtcaccgcgtcggcggaacgctcctttttatcgaactgctcaatacacggcacgccgttatctctaagcgccgcgacaatgcgctcccgctcaaagccgtccgcgcggatgaccgtgaccgggtcgctttccttaatttcttttctaagctcccgcttacagtcggggcaaattgctcccctttcaaatagggtgcagcaatgggcgcaatatttcataaagaatcgtccttttatcctgtttttctaaaaagctgtttcctgcaaacacgttcttgctgtttacaattattttatatcataacaaaaaaggcaacaaaatgcaacaaaatcgccgtgaagaatgccttccaatttcctgcacgccttccttttaaattatgggtatttttttctccccccgttcgcggctggttttgtttatgcaaagcaaaggcgcgatagaaccgagtgtcaaaattcattttcctttaatattatggaaagggtaatgtataacccccgttcaagctggcaaatatatgaacgagggtaattactccaaccgaaaataacagggaacggccaatccctgttttcaaaacagataaaaatacgttttgaatattgtttacgtaagaaaggaacggtcgaaaaaatgaatattaaacgcggtgatattttttacgccgatttaagccccgtcgtgggctccgagcagggcggcgtcaggccggtgctgattgtacagaacgacgtcggcaaccgtttcagccccacagtgattgccgctgcgattacaagccagcaatcaaaggcaaagctgcccacacatatacagctcggcgcggataactgcgggcttttaaaagattctgtcgtactgctcgaacaaatcaggacgattgacaagcgccggctcaaggaaaaaatggggcgcctcgacgaaccagccatgaaccaggtcgatcatgccatcaccatcagcttcggtcttgcacagggcgcattgcgggaagctacataaaagcatcccgctgaaattcagataacggcaagaggctccgccgccagggcgaagcctcttttttgtaggatatgaaaagcttagccgccgtttacgcggctgcataaaggacgtttctatgaattatcttgcacgcaggcgcaaaacgcggcctggataaatcatatcgggattgtctatgctgttaagctggagaatcccctccacagtcagcccataacgctgggctattgtccatagcgtgtcgcccgggcgtacaacgtaccagaccgggacctgagtctgcgcggacgggatacggatttgctggcccggatatattttatcggggaacgcaaggccgttgtagcgcgcaatatcgttgacggtcgtgccgaaatgctgggcgattccccataatgtgtcgcctggctctactgtatatacaatggttgtcatgaaatcaaatctcctttcctttctgttcgcaacctattattaatatatacgggcggctgggataaggtgcgagcttttgaccaggcttgcgcgcagcaaaggcctggatgtataatattgccgaaaggaggcgtttttttggaactggtcacagcaaaaacaattctctcggcaggatatgcggaaaataaccgctggttcggctgcaattataatatgaacctgtaccggggctgctgccacggctgcatttactgcgacagccgcagcgagtgctaccatatcgaacggttcgataccgtacgcgcaaaaaaagacgcattgaccatccttgcgcgcgagctcaaggcgaaacgccgtccgggcgtggtgggaatgggcgccatgagcgacccgtacaacccgtttgaaaaaacatacgaattcaccagaggggcgctttcgcttatccgcgacaatggcttcggcgtggcaatcgcaacgaaaagcccgcttgtcgcgcgggacgccgatattttgtgcgaaataaaaaagaacgcgcccgtactcataaaaatgacggtaaccgccgcagacgacgggctgtgccaaaaagtcgagccgcacgccccgccttcaagcgagcggttcaaggctgtaaaagagcttgcttcgcgagggatttttgccgggcttctgctgatgcccgtgctcccctttcttgaggatacgcaggataatattgcggaaatcatccgcatgtcgaaagaaagcggcgcgcggttcatttacgcgcagttcggcgtaacgctgcgttcaaatcaaagggactggttttatcaaaagctcgacgaacagtttccggggcttaaggagcggtacatccaaacgtatggggacgcgtacgagtgcgtttccccgcacgcaagggagcttttggccttttttcgcgaagaatgcaagcgcgccggcctccttacccgcatggacgacatcataagggcttataaggagccctatataaaccgtcagcttaccctgttttgacggaaaaagtggaataaatacggttcatcgagtggataataacggcaggaggtatcaattatggaacacaaaatagaaagaattacaggcagggaaattatcgattccagaggaaacccaaccgtggaagcggagattacgctcaactgcggaacgactgcccgcgcaagcgtcccgagcggcgcgtccacaggcgagtacgaggcgcacgagctgcgcgaaacggacgccccccgttacaagggcaagggcgtaatgaacgccgtgcgcaatatcaacgaaatgattgcgccgaagctgtgcggcatgaacccgctgtgccagatggacatcgactgcgcgatgaacgagctagacggtacgaaaaacaaatcgaagctaggcgcgaacgccatcctggcggtatcgctcgcggctgccaaggtatccgcaaaggccatcaaggtgccgctttacgcgtatctcggcggagcgtacgcgcatacgcttcctgtcccgatgatgaacatcctgaacggcggcgcgcacgcgggaaacaacgtagacatacaggaatttatgattatgcctgtcggcgcgaaaaccttttcaaagggcctgcagcagtgctgtgaaatttaccacacactgggcgccctgctcaaggaaatgggcaagggtacgggcgtaggcgacgaaggcggcttcgcgcccgacctcggcgcggacgaagaggccatcgagctgattatcaaagccatcgaaaaagccggctacaatacaaacgaaattaaaatcgcgctcgacgccgcaggcagcgagtgggcaaagggcgataagtacgcgctgccgaagcgcaaaactgaaatgacaagcagcgggcttattgattactgggaaaagctgattggcagctacccgattgtctccatcgaggacgggctgggcgaaaacgattgggaaggctgggcggaaatgacgcggcgcctcggcaaaaaggtacagctggtcggggacgacttgtttgttaccaataccgaacggcttacgcagggcatcacgatgcaggcgggcaactcaatcctggtcaaaatcaaccaaatcggcacgctgacggaaacgcttgccgccattgagacggcaaagcgcgcgtcctacacaaccgttatctcccaccgcagcggagagacggaggacaccacgattgccgaccttgccgtcgcggtgaacgcgggccagattaaaacgggcgcgccgtgccggacagaccgcaccgcgaagtataaccgcctgctgcgcattgaggaacagctcgaaaagcaggcgcagtacggcatacaaaaataaagccctggttataaaaaccaggccggtaaagaaaagtgccgggaagcgatgcttcccggctgtttttatgccttttcattggtaacgacatgctcgaccgtattgctcaaattcatcagcttttccttaaaaaacgtggggaacgctttataattttgcagctcctcaagcggaatccagtgcataagctccggcacgcccttatccgtaaagctgtggctgtgaagctcctgcgtaccccttggcttcatcaggaaataaaaagaaatttcgtggcagtcaaggccatcgagcgaatctgagccgtcaaaaaaattttcgtggataaacgcgagcctgtcaatctcgtacgcaacgcccgtttcttccagcacttcacgctttacagcatcctcagccgtttcccccagatggactcccccgccgatggaataataataattgtccatttcgtttcgggcaacgaggatgcagccgttttctataataattgcgcccgccctgtaccgaaaccatttttctccccgtacaaacccacaatcaaggtccataaaagcaccgctttccattctattctaccgaagcaaccgccgcgcatacggtgcttgccacaccggcgcgctttaagagacggctgcattcgtgcaatgtgttccccgtcgtgacgatatcgtctacaagcaggattgtcctgcccgaaacatcctgtttttttccgcaaaacgtataaacgccgcgtacattttcacagcgcattcccttaggcagggaatgctgcgggaggttgtctttttccttttgcagcaatggcaggtaagggacgcaaagcagccttgccagctcctttgcaagcagctccgactggttgtacccgcgctcccgccttcgttttctggaaagcgggacgcaggtgacagcgttaaacacagtatcggggtattcccttttcaacgccccaaaaaccgcgcgcgcaagccgcccggcgtactgccgctttccgtaaaacttaaaccggatgaccgctttgcggaaaagcccgtcgtaacgaaacggcgcgacgcaggtttcgccaaagagcctgcggacaaagggttcctttggaaacaatgcgaaacagtccgcacaggccagctcctccggcttgatgaccgcgccgcaaaacgggcagcgcggagggaaaaaaagttctgtcagcttcatttaattaccctttgtataaaaatttaaaaaatcacttaatgtatttaaatagaaaaaataaatacaaatggtatatttttataaaatttaactttttgttgttactcaattatatatacttaaagtaatttttatcataaaaaatacaattcgttaatctcgcagcaaaaagtatttcaggccggaatagcgcagcgtccggcggttattttgaaccatccgctcgacaaccgcttcgtttcctacgagaatcaaaagcttttttgcccttgttaccgccgtatagagcaggttgcggtagtaaagctgcgccggtccctggtacataggcatcacgacggcgttaaattcattgccctggcttttatggacggtcgccgcgtacgcgagctccaaatcgagcgcgctgtccatatcataaacggcggtcttgtcgtcaaagcgcaccttcatggtctgcccgccgcgcccaatttctgaaagtacgccgacgtccccgttaaatacgccgtcgccgttatcgccgttgtcgcgcgaccagagtatgtcgtaattgttgcgcgcctgcatgaccttatccccctcgcgcagggtcaggccgttgaccgaaagctcctttttctgcggggacggcgggttcagcgccgcctgcagcttttggttgagctcgtttgagccgagcacgcccttcctgccgggggaaagcacctggatgtcattgagcggggaatagccgtaggtgttcggcaaacgcgttttgcacagctcaacgatggtatttgaaatcgtatccctgcccatacagcgcaggaagaaaaagtcgttgtcctttcttgtgagcaccggcatttcgccgcgcacgatgctgtgcgcgtttgtgacaatcaggcttttcatcgactggcggaaaatttccgtcagctggatgaccggcatgattccggagccgattaaatcagcaagcacgttgcccgcgccgacggacggaagctggtcgcagtcgccgacgagtatcagccggcagcccatcggcagcgcgcgcatgacgctgtcgaacagctgggaatcaaccatggaaagctcgtcgataatcaaagcgtcgcagttgagcaggttcttttcattgcgctggaaaacagggcggtcgtggctgtcccacatgacctcaagcagccggtggagcgttttcgcttcgcagccggttacctccgacatgcgctgggcggcccttcccgttggagcggcaaggaacaccttttccccgttctttttgaggatttgtataatggcgttgagcgtcgtcgtttttcccgttccagggccgcctgtcagtatgagcaggccgcctgagagcgcctcgctgatggcaagcttctgcatctgcgcgtaggcgattccctcctggcgctcaatcaaatcgatttcttcttcaatatgctcgattttctgcgcgggaaagcgcagcagcatcagcatacgcgcggcgatatacgtttcgcagcggtgcatctgcggcgtaaagataaattcgcgttccccgcaggtatcgcatacaagcgtaccgtcggtgagcatttcctcaagcgcttcctccgcctgctcctgcgtaacggataaaaagctcacgcaggcagcggaaagcttgtccttcggcaggcatgtatgcccgttttgcctgttgtggccgaggatatgctgcaagcccgcgcgcacgcggcaccggtcgtcaaacgggcgctcctgcgcagccgctacggcatccgcctgttcaaacgggatatccaagccctccgtacaaagtatgtatgggttctcttctattacatcgattgcgcgctgcccgtaaagcttccagattttcaccgccgcctgcggcgttacgccgtatttttgcagctgcaccatcagctcccgtatgccgtaaacctcctggagctccgcgctcatctgtttcgccttcgcaggggtaatcccctttatttttgacaagcgctccggctcgttttccatgacctcgagcgtgtggtccccaaacgcttcgactaagcgccgcgcagtcgccgggccgattcctttgaccgctcctgacgaaaggtattttaaaatagcggacgcgctcgacggcatggagcgttcgtaggcttccacggaaaactgctcgccgtaatttgcgtggcttttgaagcgcccgattaaatgcagctcctcccccgcgcttacaagcggcaaaatgccgacagcggtgacctcttcgccgccgcagccgactgtcagtaccgtatagccgttttcctcattgcggaagattacgtcttccacctcgccggtcatttccagcagttgatttctgtccatgcttcctccggtcaattgctcttttccattcgggcggtaagcgccctgagcgtcacatcgtatgccctgctctcatatttatattccgcgcgggtaagctggaagccctcgtccctgcgcgtacagataagggttactatataatccataaaatgcgggtttttcacaagcacggggcctaccaggtgcgtaccgtacacattgttctggtgaaagccctccgcctgctgcccttcggtgtttgacaggccgagcttcacggtaaaaagcgcgtcctccacgcccttgatttcactgcatttattgataaacccgacaagcggtttctttaagaaagagcacgcgcagatacagtcgcctgtcagccgttttttattttgctccgtgacggtaaagggcgcaaagccgagggcggaatacttctttcccacagcgtctgtgacactctgcccaagcagctcaaaggcgttgcccgtcagcagcatgaccgtgccgccgtttgcggcgcttaaaaaggcgtccctgctgaacatcaagtcgttgagcgcctttttctggtttttttccgtgccgctgccgatatagataaaatcaaaatcggcaaggcaaacgccgtcggccgtgtctgtttctgttaaatgcaccttggccccctggtcctccaaatggcgcgtaagcgctttgatgttgccgtactcgccataaaggttcatcaggttatgatataaatgcagcagcttaagctccattttgttgtcctcccttttgcgccggttatatgatgttcaccttcgacagcagcttatccttgtctgcgaaacaggtaatcacataaatatattcgtcgccgttgtcctttaagtagccgaccgcctcgccgatatcctccacaacgtacagcttagcgttttccacctcggaatacgaaaaacgcgcggctaaatcgttcgcgtattttccgcttaatatgacggaagagatattatcgcccttcaaaaggtcaaagttgatgtcccaaagccacgaggtttcactcgtaaaatatttccggctgatggagtccacgataaccagcacggcgctcggccccttcgacgccgcagcaagctttaaggactggtcgtaggaaacggagttttcatgcttggaggcgagcagcacaccgctgtgcgcgccaattttaaagttgactaccctgccgttttgcaggacataattattgatgctgttgacaatcgtcgcgcttttcacgccggcaatcgaacacaccgcataggccgcaaggatattgtagacgttatacatgctgtgcagcgaaatcgaaattttatgcacgccgtcaatggtgaccgcgcccttttccaagtcgacctgcgtgaccgtatagcttgtttggttctttttatgcccgcagcgcgtacaatggtagctgcccaaatcgccgaaatggcagtaatcatactccatcttttccttgcagttggggcagaacatcccgtcgttgtaaacgcccgtcggtttatcggaggaaccgctgtagcggtcgacgccgaaccagacggtattttccctgttatagccgaacagcgaaacgagcgggtcgtccgcgttcaaaacaagctgcgtttcgtcgcggatactgtgtttcagcgcatcgaacacccattccggatggccgtttctcgtaagctggtcgcggtacaggttggttattacataatgggtcggggcaaaatactggaaggtatagcgcgcgtagcgctcgtccgattcgattaagaggatatcctccttcattttcccgagcagcgaacaggaggataaaataagcgtcgccacgccctctatctggttggagccctctttattccaggcgacgcgcttgccgcccgcttttaagatatgtgcaatcatctccaccgtggaggttttgccgttgcttcctgtaaccgcaatcacatattccgggagctttaccttgcttaaaatatttggataaagctttaaggcgatctggccgggcaggctgctgccgcgccccagaacgcctcctataaatttcaaaagcttacaaatcaaaatgacaaaaaacattctcataccggaccgtcccaactttggttcataatggtttgataacaataaattattataccataaagggacgttccataacaggggaaattcaaatttatctggtttttttgaaaagatttacttttccggggattccttcatctccatgaaatcataatcactgcaaaccgtatcgcagatttttttcgtttcgtcgtccatcccacagtcgaggcagacgacctttttaaaccggcctccgccggcccatttgacgcgcgccgccgcgtggcgcaggacgatttccgcctcttcatcgtgcccgcgaatcggtacgaccataatcacgtccccgtctttttttgaacgcatgaaaaacagaacgaccgaccttgcaatctgcaccaggccgattatcgccaaaatgataaaaacgatatcacgaattatgtaaagcataaaaccacctcaatgcagtctatgccggatagcaaattctgtgccgtataaaaaaaacgtaaacgcttacaataaacatgacggttcttccgtctctgaacaaacaaaatcaagtacgtgaaagtacagtacaaaaggaaaggaatggaaaagcatggacaacagctttgcaaacaagagcattaaatgttccgttcagcagtgcaagtaccacaacaatcatgaggattactgctccctcgactgcattaaggtgggcacacacgaggaaaacccgactgtgaaccagtgcaccgactgcgaatccttcgaggtaaaaagcagctgctgctaaataaacggcagtaaagctttacgctgaaacaaaagaacgcacacgcaagggcccaggcctttttgcgtgtgcgttttacatattcactttaaagggcgcatccccatattatatgttgtcagagataaattgacttttctctaccgatacacgttatgggggtaacgattgtgattcatataaacagctttgggattataggtggtgacaaacgccagctttccgctgcccgggcaatctgcgaggacggctataccgtcctgttaagcgggtttgaccggattgagcagcttttggggcatgtcgacgggattgtgacgccgcaggaatgcgcgctttgcagcgaggtcattattctgcccctgcccgtgacgaaagacggaaaaaccttaaacgctccgtttgctaaggagaaaataccgctcgacgattcgttcgcccgtatgatgcagggcaagcgcgtctactgcggcatgaaggaaaagctcgtcaagtcgagcaagctctggaacgatattttcctgttcgactatttcgaccgggaagaattcaatgttttaaacgcggtcgcaacgtctgagggcgctgtggaaatcgccatgaaggaatatcccggtacaatcaacggcgccaactgcctggtaacgggctatgggcgcatttcgaaggttttaaccaatatattaaagggcctgggcgcgcacgtcagcgtcgcggcaaggaaaaagcaggaccttgcgtgggccagcctcaacggctgccggcctgtcgatatgagagacctgagcgagagcgggcagtacgacatcatttttaacaccgtacccgccatgatactcgactcccacgcgctcgcgcacatcgcgcttgattccgtggtcatcgacctagcgtccatgccgggcggcgtcgatttcgacagcgccaagcgcatgggcatcgacgcggttcacgcgctttccctgcccggaaaggtcgccccgaaatcatcgggagaaattattaaaaataccatattcaatatgctcgaggaggcttaaacagtgaggaaagccacgataggttttgcaatgtgcggctcattctgcaccttctccaacgcgctcacggaaatggagaggctaaaagaagccggatttgatattatacccattatgtcgtttaacgcatacacgacagacacgcgctttggcaaggcggaagaaatcaacaggcgcgtcgaggaaatctgcgggcggggtatcatccacaccatccccgccgccgagccgattggcccgaaaaaaatgtgcgacgtcatcgtcgtaacgccctgtacgggcaacacgctcgcaaaaatcacaaacggcattacagacacacccgtaaccatggcggtcaagtcgcatttgcgtatcggccgcccggtcgtcataacgctcgcaagcaacgacgcgctcggcgcgtccgcgcagaacatcggcaaagcgcttaacaccaagcatattttctttacgcctctgtcgcaggacgacccggaaaaaaagcccaattccctggttgcgcatttcgacaagctggaggatacgctgacgcttgcattggaagaaaaacagcttcagccggttttctgctgagcttttgataaaaagaccgttctattcccatctgaaatagaacggtctttttctgttattgcccggaatctattccgatgggcgtctggtagccgatatcctcaacgcatgtatatgcggcctcaagcgtgaggctcttttttgtaaccgtttttttaatctgcctgtctttgatttccgcattcgcaaggccaaacgcctcgtaaagcgaaagctgtgccatggcgctttgctccgcctgcttctgcgtgagcgcctgccgctgttcgcggtattcgtaccaatgctccgtataaatatcaaacggcagcccgttgccgttgatggtatagttgtcaaggcgcgcctgcttataataggttccctgcgggacgaagtggaaatcgagcgggaagcggatattcaggagcctgccctgccgccgcgtgaccgattcgcctgtcggcagcagctgcgtgcgctcaaacggtacctctaccctttggatgtgctgcgtctgcgcgtaaacctttgcttcgctgtgccatagggtcgactgccccaggctgtcttccatgacgccgcttataagcagctggcccttaaccacaccgtcgcccgtcttgaccgcggccgcgccctttgcgatatccatgcgcaaaatctgcccgtcgcaggctgccttgatgttgcacggctggtcgtcgggtacgatttcagggcgcttgtagctttcggaaagctccacatatgccgtcgtaccgatgatattgacggaaagccagccgacctgcccgatttgcagcgttgcgtcgcgctccaggcggtcaatatcgaagctgcttttaaacacgcctgtcgaaaggccgttgtccgcaagggctgtgcgcacatccgtttcgctaaggtggtcaagccccgatatttccacactccagataaacgacgacataatctggattaaaataaaaaagacggcgattcccgccaccaggccaacgcgttttttgttgcggtatataataaacggaaggcccttctttttggttacgcgcagctttacacccgcgcgcctggcaacaggccggatttccttataattgctgaccgccgttttcgcccgcagctttcccttttccccgaccggctcccaaagcgggatgtcctcacgcagcgtcaggtttaaaaagcgttccgggaacgcgccctgcgcctcaaagcccacatagccgcgcagccaccgcaggatatttaaaacaaacatgcaaccgactccccttaacggacaaactcgaccgaagtaatatacccctcaacaatcagcgaggaggcagtcaggcatttgatattgagccccctgccgcaaaacgagataaccaatccccccgcgttgacgcggataacctgtgtgtcatattccagtatgcccttgcagccctctatgagcgcctccctgttccccttgagctctatatatggcatattcggcatcaattgctgcggcacgctcagcagcttcggcttttgctggggcccgcagccgtcgtccttttgtctggactttgccatatttccaccacgtttctgcataaggttggccgcccggttcataaacttaacaggtacggctgtttaaaattatgctttggcggtggtagttatgacacagggcgcgtacgaggggctgctgttttgcgcgcagattttaatcccctccctgttcccttttatggttttatcctcgtttgtcgtcaactgcggcatttcaggaattttatcgcgttttttagcgcccgtaacgaaaagctttttccgcctgcccgggagtgccggcgtaacaatcctgcttagtatgttcggcggctacccggttggggcgcgcggtatccgcaccctgcttgaccggggccttatcacgcgggaggagggcgcgcgcatgctctgcttcgccgtcggcgcgggaccggcgtttgttattttcgcggtgggctgctcgcttctgcacgacgtcacgatgggcatcatactgtttgcggcgcaggcggtaacgcagcttatcctcggctttgcgtcgcgctttctctgtaagaacgatacatataaacagaacatgccggataaagtaaagccgatgccgcttgcaagcgcctttgtacagtcgtgcgcggacggcgtgctcgggatgctcaacctctgcggcatggtcgtgctgttttcctctttaatgggaatcctgcaaagcggcggcgcgcagtcgatgtttgaaaacctgctgacgggctgcggcgtaagcaaggcggcggcctcctctatcctgcctatcctgtttgaggttacaggcggctgcaacagggcggcaaacgcgggcgcttcctacgagctgatggcctttgcaatcggctggggcgggctgtgcgtgcatttccaggtgtattccgccgtcggggagctgcccgtcaaacggctgctgtttacactgttccgcgtgctgcagggcgcgctttgcgcgggcatcacgtatggtatccttctcttttaccatcccgagccggtcgcggacgctttttccaacgtacaaaagagcgtaagcgccgcgtcctcctcaacaatcgcgggaagcatcgcgctgattgtcatgtgcttctgcttccttttctcctaccagaggtaccaaaagaaacagaagcgcataatataatagccgcggaattgtattatcatagaacccgtcccctgttcgcggtatcaaacctccgctggcggggaatcctaacttttgacagtaaggtggaatgcttatgtgtggaattgccggatggctcgaccgatacgaggatttaagcgaaaaggcaggcgtaatcgacgcgatgtcgaagacgcttgtccgccgcggccccgacgaggacggcgtgtacttaaaccgggagcagggcgtgtgcctgatacaccgcaggcttatcgttatcgacccggaaaacggaaaacagccgatgacggtaaaaggcgcgggcgggcggtttaccctcgtatataacggggagctttacaatacggaggatttacgcgcggagcttaaagcgctcggctatacctttgaaggccactccgatacagaggtgctgctgaactcctatatcgcatggggcgaatgctgtgtagaaaagctcaacggcatttttgcctttgccgtatgggacgaaagcaaccgccggctgtttatggcgagggaccgcatcggggtcaagccgtttttctattacacctacaaaaacgggctgctgttcggctccgaaatcaaggcgctgcttgcaaacccgctattaaagccgcagattgacgaggagggcctaaacgaaatcttctttgtcggcccgggcaggagcggcggcctgggtgtactgcgcggcgttaaggagctgctgccgggcgaatgcgccgtttatgaaaatggggcgctgcaaaaacgccgttactttacccttaaggcgcgcgagcacaccgacagcgaggcgcagaccattgaagccacgcggtttttactgaaggattccatccgcaggcagctcgtatccgacgtgccgctgtgctgcttcctgtccggcgggctcgattcgagcatcatctccaaggtagccgcggattactataaagaaaaggggctcgggcagctcaccacctattccgtcgattacgccgacaacgcgaaatattttgaaaagagcctgttccagccaaacgccgacagcgactatatctcgctgatggcggaagcaatcggctcagaccacaggcaggtcattttagacaaccagaggctctacgacgcgctcatccccgctgtggaggcgcgcgacctgccagccatggtagacgtggattcttcccttctgctgttctgccaggcagttaaggaggatttcaccgtcgcgctctccggcgaatgcgccgacgagctgtttggcggctatccgtggtaccacaaccgtgatattttgtttgaggaatgcttcccgtggtcacgcagccttgacatccgccgcagcgtgctgaaaaaggggctactgccaaagggcgaagcgtacgtgcacagccgttatatggacacggtaaacaaaaccgacaagctcccaaatgaggacccgctcgaagcgcgcatgaaggaaatgttcatgctcaatttcaactggttcatgcaggggcttttagaccgcaaggacaggatgtccatgtacagcgggctggaggtcagggtgccgttttgcgactggcggcttgtggaatacgcctacaacatgccgtggagcctaaaggccctgcatggcagggaaaagggcatcctgcgcaccgctatggacagcggcctcccctatgaaatcacctggcgcaaaaagagcccatatcccaaaacccataaccctatctatatgaagctgtgcagcgagggcgcgaagaaggtgctcaaggacaaaagctccgtactgcgcgggttccttgatgaaagcggcgtgatggaaattatcaatcatccggaggaaatttcctccccgtggtacgggcagctcatgcgcgcgccgcagattctcgcctatattgtagagatggactactggttcaaaaaatacaatgtggagatagtcgggatgtagcctagcgcaccgtaccctttgcaaggcgcacaagcaagccggaaaacgggaacagcagcgcggtgcacaggatattgaacaccgtgtggatgagcgcaatcatctcaggcgaggcgctttggtccataaaggaaaaacgcataaaaatatcgcacccgtaaaacgccgcgagccagaacagcgcgccgatgatattgaaatataaatggataaacgcggtgcgtttggcgtttttgttcgtcccgatgcaggaaatgagcgccgtgacgcacgtgccgatgttctgccccattacaatagggacagcgctcgcaaagggtaccgtccccgtaagcgacagcgcctgcaaaagcccgacagaggccgaggagctctgcaaaacggcagtgaccgccgtacccgcaagcagcccgtagaaggggtttgaaaaaagcgtgagcacctgcgccgtctgagggacatcgcgcaagggtgaaagggaatagcccatcagctccataccgcacatcaggagggcgaagccgaagcagcaggcggctaagcccttctttttccgttttgggaaaaaataaagcaacaggccgcacagtgcgcttgccgcggcaattgtataggaattcacaaggatggaaagcaggcccctgcccttcattcccacaaggctcaaaatccatgaggtggctgtcgtaccgatgtttgcgcccatgataacgccgactgtttccctgagtgtcaatataccggcgtttacaagccccactagcataacggtcacggcggagctggactggatgaccgccgttacgccagcgccaaggcacaaccccttaaagctgctggaggtcaggcgcgcgagcgaattcctaagcctgtcccccgtatgcttttcaagtgcacgggtcatacatttcatgccaaacataaaaagggcaagcccgaaaacaaacaaaaaaatatgggtaacaagcagcatatcaaacgaccgtcctttatccaaacgttccataggcatttgtatgcaaaaaaacggccaagcagaacgcctgtccgattacccggacaagcactttaacaaatcccattatctctgaactttcttttgcagaatcctccatccaacacttacatttgcattgcgtcccgcttttttgttatcctgtttgcaggaggtatcagttatgaaattatcaagaaaacttttcagcacgcttacagccgcggcgctaatccttacaattgccgccgtacccgtaagcgctgcgtcatctagcacctacacggtgcaaaagggcgattccatgtggaaaatcgccgtaaagtacgaaatcggcgtcagcgagattatcggcgcgaacccgcaggtatctaatcccgatttgatttaccccgggcaggtgctcaatatcccgtcccttgactcctctgtcctgagctttgaggaagaggttgtccgccttgtaaacaaggagcgcacatccaggggcttaaaggctctgtccatgaattgggagctctcccgcgtggcgcgctacaagtcgcaggatatgaaggacaaccgttactttgcgcataacagcccaacgtacggttccccaggcaaaatgatacgcgacttcggtatttcctaccgcagctacggcgagaacatcgcgtatggctaccgcacaccgcaggcagtcgttgacggctggatgaattcaagcgggcaccgcgcgaatattctgaacacttcgtttacgcagattggcgtaggttatgtttcctccggcagctactggacgcagatgtttatcggctaatagcctaacacaaaaacagccgccaggttttttacccggcggctgttcttttatatatatttatacgggtgtaagcatcattactagtaatcggagctgttttttacaggagccattccttttaagaactcgttgaagtccaccttaaaaatttctgttagggcgattaaatcgctgacaaatatattgcgcgtgccattttctatttttgaatagcttgagcggtacatcggactgcccatcaaattgagctttgtgcaaacctcatcctgtgtcatatgcctttctttacgaatccttttcagatttgttccaatagtgatatcctgtaatatttttgtcataacaatacactccttaccgtctcctgttgtaattgtgagtttattataacaaagaaaagggttacaaatataaccgcctggttataagtttgtttttggagaatttttttaaagcatttttgcttcttaacattctttatcaaactttctctgctttattcttgctttttctttcatttcttcataaaactttctatgcttaatcaaaagaggagaaaccgtttcggcggtttccctcttttcagggcatcagggtaccggagccaatgcggtttgaaaaggccatctccaccgctatctgcgcaatactcacgcgccatgcgccagcatggcttgttcgctttgcttgcaaccggcggagctttctcttttcaaacttcttcgaaccaaatcatgaggcttttatcggttatggcgaggcagaggacgaacgaaggcttgcgccttcggaggacgataacgaagccagagacagaaaagcccatgatttggcgcattgttcccggcatcctgatgcccgtcacctttccgccgacttaagggaacccagagttcccttaagaatccttcggcggtgctgtaggcattgtggtcgctcctcgttttatgtgcggggcgtagaacagatactgcgggacgtttcagcgccgcgccttcgcgcggagtacctcgtggggttggtactttcttggtgcgcggggtacttcgtgggagtagagctttttatgtattattagtaactgtgaattcatgtttttacggggaacggcaggtcgctatcaattaaagccacaagcatcaggcgtgcgccgagcctgtagccctgtgaaaagcattccatatttgcaacgtcgagccagtcgtatacgccctcctccaaatacgttgtaaacaactttttgttcttgcccagcagagcggaaatctcatgttcctgctttgatattctgcctactaccgcttggtaagccggagtaggcttttgcaggccgggcttgatgtccccataaaaaagctgctcaagcaacggagacatttcgttctttgcattttcactcggcttacagtcttttacaaacggcgagtctggcttcttctttttctttttcatgtgttttcctcctgttgtatatcatttttttacttgccacagcagaattacagaacatctttaaatagctgcagccgttgcccatgttatcgcacttactgttttgcttctgcttgcaacttcttttctattgcttcacccataaacatcctcctttagtattttcaaactcgataaggcataaattgtctctatttcaatttcttatcaagcttgtaacaactacggcttgatttcattgtacataatattttatgtaaagtcaatacataatatgttatgtgaattataatcaacattattaagcatattggagatgtatttgcatgaaaaactattgccagagacttaaagaccttcgagaagaccacgattactcgcaaaaaaagattgcacaaatacttgaaatatctcaacagtattactctcaatatgaactaggaaaaagggagttccccattagacaccttattaagcttgccaaattatatcaagtgtcaacagattatattcttggtttaagcaatgattcgactaaaagttggttagacgcaaagaaataagtaaaatcaataaaataccactctcacgagatactccgcgcgcaggcgcggcgcacagcggtcccgtactatctgttctacaccccatacataaaacgaggaacggatagttatctcttagggggattttcaaggggcttcgctccttgaatcggctgtggagggataggcggagggcggcgtgatgctttgccgcccgtaagccgtaagggaacccatcgaaagggttcccttgtaccgacgaaaagggtttacaaaagggaaaaacagcggattgtttttcccttttgattaaaacatagaaagttttatgaagaaaatcaagaaacagcttgtttcttgaaaattcagaagcagtatgcttcattcaataaataaagaaacagcacatttctcaaaaaaacaaaaagcagagcctttcctgcaaaaagcgggaggaaacaatgtttcctcccgcttttttgtgtgcaggttttaagacgcgctttcaaactgtgaattataaaggtcggcgtagaagccgttcgcgctgagtaattcctcatgcgtgccctgctcgacgatatcgccgtcgcgcatgacgaggattaagtccgcgtcgcggatggtagaaaggcggtgcgcgatgataaagctcgttctgcccttcatcaggttatccatcgccttctggatgcgtacctctgtgcgcgtatcgacggagctggtcgcctcgtcgagaatcaaaatcttcgggtcagccaaaatggtgcgcgcaatcgtaaggagctgcttctgtccctgagagacattcgaggcctcttcgttaagcaccatgttgtagccgtcgggcagcgtctgcacaaagtggtgcacatgcgccgcctttgccgccgcgacgacctcgtcgtcggtcgcgtcaagcttgccgtagcggatgttctccataatcgtaccggagaacagccacgtatcctgcagaaccatgccgaacagctcccgaagctcgctgcggtcgaaatccttgatgttatggccgtccaccaggattgcgccctcgtttacgtcgtaaaagcgcatcaaaagcttaaccattgtggttttgcccgcgccggtcgggccgacgatagcaattttttggccctgcttgatatccgcggagaagtcgttgatgataatcttatccggattatatccaaaatgcacgtggtcgaattcgacctcgccgtcgatgtcgctgatggtaatgttcctcgcgacggtttgccgcctgccctcgctgtccgttacggtttccgtaagcgaagcatgttctttcgcggtctgctcctcctccggctcgcccaagaattcaaaaactctttccgctgccgccgccatggactggagcatattggaaacctgcgcgacctgtgtgattggctgggtaaagctcctgacgtactggataaaggactggatatcaccgacggcaatcgagccgttgatgacgaaatagccgccgagcaccgcaatcgcgacataccccaggttgccgacaaactgcataatcggctgcatcagccccgagaggaactgcgacttccaagcgcttttgtagagcatttcgttcgactgctcgaatgtgtcgatggtctcctgctcgttgttgaacgcctggacaatgttcacgccgccgaacgtttcttcaacctgcccgttgacatgcccaaggtaatcctgctggttgcggaaatgcttctgcgaatgcttgacgatgattgacacaatcaccatagaaatcggcagaatcagcagcgcgacaatcgtcataatccagttgatggagaacatcataatcaaaataccaatgatggtcgtgaccgatgtgataagctgcgttgcgctctggttgaggctcatagacagggtgtccacgtcgtttgtgacgatggaaagcacctcgcctgtctgctttttatcgaagaaattcattggcaggcggttgattttttcagaaatttcgcgccgcatgcggtaggtgattttctgagtgatgcccgtcatcagcattccctggataaacgtaaacagggcgcttacgatatacagcccgagcaggaacagcaggatttcaccaattctgccaaaatcgattccgccgctgccccctatcttgttcatcaggccgttgaacagctctgtcgtcgcggtacctaatatctttgggccgacaatcatgaagatggtgcccgcaacggcgcagatgataacaaaaatgagcgcgattttatattttcccatataagagagcatctttttcatcgtgcccttaaagtcctttgccttctcgcccgtacccatcgggccgccgggaccgtggcccctcatcgggcgccttggctttgtatgtgcactcatttctccaattcctcctttgacaactgggatgccgcaatctggcggtatacttcgcaggagttcataagctctttgtgcgtgcctgttccggcaatctcgccgttatccaggacgataatctggtcggcattgagaactgtgctgattctctgcgcgacgattaaaatcgtactgcctgacgttgcgtcgttgagcgcttttctaagcgccacgtccgttttataatcgagcgccgaaaagctgtcgtcgaaaatataaatctgcggttcttttgcaaccgcccttgcgatagagaggcgctggcgctgcccgccggaaacgttcgtgccgccctgcgcaatctcggaattatactgcgtgggtttggcctcgataaagtccgtcgcctgcgcaatctgcgcggcgcgctttacctgcccggcattttcctcttccatgccgtaggcaatattgctttcgattgtgccggagaacaggataccctgctgcggcacatagccgatgtcttttctcaaatcatgttttttgaccttgcggatatcgacgccgtttacaaggattttgccgcccgtcacatcaaagaaacgcggaatcaaattgataagcgtcgatttgccgctgcctgtactgccgataaacgcggtcgtctggccgggccttgcggaaaagttgatgttgcgcagcacatcctcctcagcgcccggatagcggaaatatacgtccttaaattccacgacgccctttttatcttccctgaacgcttgtgcttcctccgggtcgtttaccgtgacctcggtttcaatcacctcggcgacgcgcgaagcggataccagggcccttggcagcatgatgctcatcatcgagagcatcaggaaggacatgataatctgcatagtgtactggataaaggccataaggttgccgacctgcatctggccgttgttgatggaatccgcgcccacccatatgataagcacgctgataccgttcataataaacatcatcagcggcatcatgaacgtcatgacacggttgacaaacaggttggttctcgttagctcggcattggccttgtcaaagcgctcttcctcgtgcttttcgcgggagaacgcgcggataaccggcaggcccgtgaggatttccctcgatacgaggtttaccttgtcaacgagcttctgcaataccttaaagcgcggcatcgcgacaaagtacagcacaatgacgaccgctaaaatcagcccgatgccgacgccgataacccaggtcatgccgccttccgtaccgatgaccttcgtcaaagcgccaacgccgagaatcggggcgtagatgaccatccgcagcgtcataacgacgagcatctgtatctgctggatgtcgttcgtacagcgtgtaatgagcgacgcggtagaaaatttgttaaactcccggttggaaaaggaaatgacctttctgaacacggcgttgcgcaaatcgtggccgaacagcgagccgatgcgggacgaaagcagcgtaacgagcgccgcggcgattacgataacaagtgaatacgcgagcatccggagccccgcgttccagatataatcgttttgcagcttgtcggtatcgataccggcttctttgtattccttctgtacaaaggaaaccgccatctgcttgataatgctcttatcgatatcctcgtatttctccgtctgcccttcaaaggacttgagcatttggttcctctgctcctccggcatctggtctaatacatcaaggattgtcgcattttccggtaccatgccggccggcatggcctgcgtcatctgcgcggtcatttctttgacctgcttgttatcgctttctaaaaacgacacgacgagcatcggcacgccgaagatttcttcgagctcttctatatcagcgctcttgattccgtcgtttaaaacatatacctttaagccttcctttttatcgctgttttcaagcgagtagcgggacagaaccgcttccttgtctttctcatccataaaatagaaaagccggttcatctggctttcccggatttcctgcggggcgatatgttctacgccgccctgctggatgccgatattgacaatattcgagatattttcaggcagcgacaagtcgcagaacgcctggattacgagcaggacaataacggcaagaatcggcaaaaccgaccgcttgaggtatttgaacagctttgtcatatctcctttgtctccttcccttcgtgtgttggcgccccggtttttccactttgtgcttttgacagccgccgctgtatttcctccatatcgacctgggcgacgacctcatgaaattttttcatcaaagtgataaacctgagcgtatcttcataacccattttctctacaaccatattaattgcttcatgcatctgtgcgttctgccgctcgaacatcccgattcccttcctggtaaaccggacgtacacgctgcgcctgtcgcttttttgaacgacgcgctccacaagccctttatcctccagcttgttgattacctgggaaagcgcgggcttggaaatttgaatatgcgcgctgatatcgctcgttttgacgagctccttcggcaggcagccgccggacaaaaagcgcattgcgcgaaaaacggcaagctcgctgtagctcagctcgctgaaaaagtgcggtatcttcgaggctttccgtacgccaatcatcgcatctaagaattccctcgtgatatcctgctcctccacgattgcttccacctctttttaaatcgttaagtaacttaatggtttatgaagttaataactattatagctgaatcaaaagagatgtcaagcagttaattatgaacaattaatgaatgttgttttttagctttttaaacaagctctttgtcgcacgtggtaaaaatttttctatattatttgtgcattttttcactattcatttgtatttttttcatgtgtgctttataataaaaaacagagaaaatatgtacgggagcactgctgtgtcctcccgttggattaacggaatgcatcctcgaacgcatctacgccgcgctgtgtttgggcggcggcgaattccgcctgttctttttccggcgcgtccacattttcgtcgattttgccgagcaggataaacgcgacataatcgccgcggcgcacgacctttgcagcgtttattttcgccgcgttgaccgggtacatcatggaatcgtttattttcttctcacgcgcttcgttcaattgcttttccacctctttgcctttgccctccttggccttgacgacgagaaggcggtccggatggaagccgattgcgggcagctcgcccttttgctcctcgattaaatctttttcgagcttgaactcttcctttaaatgctccgtatcaatttcggtgtccggcaggtagtcctccccataggcggtcttgattttatcaaacacgcgctcaaccgcaagctgggactgctccccgcggtatgcgtcgtccccttgcccgcagccggccataattatacaaatagtaatagtagataacaatattgctattagttttattttttgttttcccataattgccctccgttttttgttgtttgtttgtattgtctgtgttattatatccgggaagcgtattgaaataccgctgactgtaaagaaaggaaatttatggtatatgaagaaactcacggcaattttattgctcttcgctcttatgctttctttttctgcctgcaccccagcgccttcgggcggcggttcgcgggaggatacggagaagctgcgtatcgtaacgacgatttttccgccatacgactttgcaaggcaggttaccggcgataaggcggagcttgccatgctgctccaccccggcgcggaaagccacagctatgagccttctccgaaggatatcatcaaaatccagcagagcgacatctttatttacgtaggcggcgaatcggacaaatgggtggacgaggtgctttcttcgcttgataccgaaagcatacgcgtcattaagctgatggactgcgtaaacgcgcttgaggaagagcatgtggagggtatggacgaaggacacgaggacggggaggacggctacgaatatgacgagcacgtctggacttcgcccaaaaacgctgtactgattacggaaaaaataaatgaggcggcctgcgaggcggacaaaggcaatgcttcttattataaggaaaggacgcaaagctatttagaaacgctcaaggcgctcgaccattcctttacgctcgctgtgaaggaagcaaagcggcacgtaatggtattcggcgaccgcttccccttccgctacttcacagacgcgtacggccttacctattacgccgcgtttccgggctgcagctccgaaacggagccgagcgcagcgacgctcaagtttttaatcgataaggtcagggatgaaaaaatcccctatgtgtttaccattgaaatgtcggaccagaaggtagcggacactatctgcgaggcaaccggcgccaaaaagcttttgttccattcgtgccataacgtaacgaaagaggaatttgaaagcggcgttacttatgtatccctgatgcaggaaaaccataaaaatttacttgcggctttgaactgattttccggttcagagcctgtccatttttagaataaaaacgaaggagcgcagatatgttttcaaaattcagcgtaaaaaaaccgatgaccgtctttgtcgcggtcattatcgttattatattgggggttgtgtcatttaccaatatgacgcccgacctgctgccgaatatggatttcccttacgtcgtcgtcatgacgacctatcccggcgcaagccctgaggaggtcgaaacaaccgtcaccaagccgatggagcagtcgatggctacactcgagaaaatcgaggacgtcagctccacctcggctgaaaactattccatgattgtgctgcaattctcggacgacacaaatatggacgcggctaccatcaatatccgcgaaaaaatcgacctaatcaaaggcggctggaacgagcgtgtcggcacgccttatatgctcaaaatcaatcccgacgtaatgccggtttctgttgcggcggttgaccgcgacgggcttgacgtcaaagagctttcaagctttgtagagaacagcatcacaccaaagcttgaggggattgagggcgttgcaagcgtaaacgccggcgggcttatcgaccagaaggtaaacgtcatgctttcccaggaaaaaatagacgcggtcaacaaaaaaatacaggccgcgctgaacgggaagtttgacgacgcgcagaaggagctcgacggctccaaggataaaatacaggatgggctcgaccaggtaaacagcggaaaagagcaggcgcaaagcggcaaggaaacgctttccaaaaaggaaaaagagctttcacagcagcttgccgccgcgcagggcacgctcgatgaaaaacagcagcagcttcttgaaggcaagctggagctggtttcccagttaaaagaccttgccagccagaaaacgcagctgctggaaacaaagaaacagctcgccgccctccaggaggcgtatacaaggctcgacggtactatttcctctttaaatgaaacggtgcagacactgcagaagcttaacgatacgcgcctcgatttaaaggagcgcacagacgcgctcaatgagcaaatcgaagccatacagaacaatccttccctgagcgatgaagaaaaggcgcagatggtatcctccataaaatcaagcggggaatacatagctgttgaaaaggaaacgaaggaattcgaacaggcgctctctcagtacggtatgacgaagcaggagctgccgctcaagctcgagcaggcaaagcttacgcaaaaggcggcgcaggccgcgcttactgagctgaacaaggcgcttgaaaagctgggaatcagccctgggcagctaaaagaatcgattgcgcagcttgaacagggccttgctaaaatcacagaaggcgaaacgcagcttaacgaagcgctttcccagcttgaggctggtgaaatcacgctgaaggaagcaaaacagcagctcaatacccagcagacaaacggcatgttccagcttaaccaggcgctctcggagcttgtgtccggccagtcggcgcttgccgccacgcagcagcagcttgaaagcgcgatgacgcaggtggacagcggccttagcgagctgaaaacaaagaaacaggaggcgctcgacgccgctgatttgaacaagaccattacgatggacatggtttcgcaaattctggcggccgagaacttttcaatgcccgcgggctatgtcacggaggacggcgtcgattacctggtacgcgtgggcgacgaattttccgattcgcaggaaattgaggatatgacgctgttcgacctgaaaatagacggcgtcggccccatcaagctcaccgacgtggcggacgttatcgtcacggacaacgcggaggatatttacgccaaaatcaacgggaacaacggcgttatcctttcgttcaccaagcagtcgacatacgcgaccgccgacgtgtccgacaatatcaacaagtgctttgaagagctgcagggcaaatatgacggcctgcacttcacctccctgatggaccagggcagctatatctatatcgttgtaaacagcgtcctgcaaaacctgctgtttggcgcgctgcttgctattttaatcctgctgttcttcttaaaggacatcaagccgaccctgattatcgcatgctccatccccatcagcgtcgtgtttgccattgtcctgatgtatttttcaggcgttacgctcaacatcatctccctgtcgggccttgcggtcggcgtcggtatgctcgtggacaacagcgtcgtcgttattgagaacatttaccgcctgcgcaatgagggcgcatcagccatcaaggcttctgtatccggcgcggtacaggtcgcgggcgctattgcctcctcgacgctcacgaccatatgcgtattccttccgattatatttatccagggcattacgcgccagctgttcaccgatatggcgctgaccatcgcctattccctgcttgcaagcctgctcgtcgcgcttacgctcgtaccggcaatgtcgcaggggatgctacgcaaaacaaaaccggtcaggcacggcctgttcaacaggtttttaaagggatacgagaaatccgcgcgctttgcgctcaaatataaatttgtcccgctgctcgtatcggttatactgcttgtcgtaagcgttgtgtttgtcgtacaaaaaggctttgcctttatgccggaatcggagggcgaaagcatttccgtcaatgtggaaatgccagaggacgccacctttgacgacacaacgaaggtagcggatgaaattttaaagcaggcagataccataaaagacattgaaaccgtcggcgtaatggtcggaggaaacatgggcagcatgctcggaatgggctcctccggcgggcaaggcagcggggaaagcaccaccgttatgatgtatgtgcttccaaagaaaaacgcgtccatgtcgaacgggaaaattgcgaaggcgcttgaagaaaaatgcggcgggctgaacgcaaaggttacggcgagcgccgaatcctccatgatgtcgatgagctccatgggagcctccggcattacgctcaaactttacggcgaagacctcgaccagctctatacacaggcgacggaaatcgggaagctgatagaagctgtggacggcgtagccgaggtggacaacggcgttgaagatactacgccggaaatccgcgttaccgtcgataaaacgaaggcgatgctcaaggggctgactgtcgcgcaggtttatatggatatctcagcggcaatcaaaagcgagacggccgcaaccacactgaagcaggcagacggcagcggcgttgacgtgattgtcgtggacggcaaagcaaaggacattaccccggacgatatcagggactatgtcctcaccgccgcccagcaggacgggagcgagacaaaggtgaaattgagcgacattgccacgatagaagacgcgcagtcgcttaattccatctcacgcgacaaccagcgccggtatatctcggtcagcgcggagcttgaacaggggcgcaatgtaacgctcgttacaaacgcggtacagaaggcgctcgacggccatacccttcccgaagggatgtcggtcgattattctggtgaaaacgagacgattatggagtcgctttcccagctgatgaccatgctgctgctcgcggtcgtgctcatctatttgattatggtagcgcagttccagtcgcttttgtcgccgtttatcgtcatgttcaccatcccgctggcgtttacgggcggcctgctcgcgcttttgattacaggcaacgaattaagcgtcgtttccatgattggtttcgtcatgctcgcgggtattatcgtaaacaacggcattgtgctgattgattatatcaaccgcctgcgcatgtccggtatggaaaagaaggaagcaattatcgaagcctccaaaacgaggatgcgccccatcctgatgacggcgattacaaccattttgggcctttccaccatggcgctcggcataggaaccggctccgaaatgatgcagccggtcgcaatcgtatgcatcggcggattaatatacgccacggcgatgacgctttatgtcgtacccgccatgtacgatattttaagccgcaaaaaaatgcgcgtcataagcgcgcaggaccttgaggttttagaggatgacgaggcgctcgaagctgtaaagcaggaacggcaagaagcgcccggcgaaaaataacaatataaaaacaggatataaaaagagggtgcgtacgcaccctctttatttttttgaattgtattaaccgcccttcgccccctgccggatgcggttcatcctgccattaactttgattattacgctataatttccgagacttgattacgaaggtgacaggaagcatcttagctttttccgcaaattcgccgcggtcgttttgtatgatttcatcatcagactgttctaccatctcttcaataacaaaccccgcttttgccaacgcgttcacataagttgacaatttacggtcagataatgacaatgtacccccgccgaacgatgccgaataccaggattcatcaaaatagcattttttaaaaacaagcgtatctttttccttagaaacgcatttatgtaccggatgtgaccagctgaaaataaacacgccgtcttttttcaggtaagacgaaatccggcaaaacgtaccttctaaatctgtcgtccagcctatagcatagatggaatatacaatatcgaagtaatcattcggtatcccacattcttcctccatgggtgaacaaatcagttttgccgaaaggccgcgcgactttaaatacaggtccgtcttttccaattgctttttggagatatctatcccccataattcggccgctttgcgctcaccgtgatattgcagggaatgtccggttccacagccgatttccagcagctttttgcctaatacatcgccaaaaagccggcatttttcttctgagacatacgcaccgtacaaaggcagcgcagtcgtccctaaaacgtcgtttccttttgtatcccaaaaagcgccgtttgttttatgtatggcgtcccggtccatttcaatcgtgctggcgcagcctgcctcgccggcgcctataatgtttgtacggctgtcagtctttttatccatgtttcaactcttttcttcccgcagcgccgagcttttggaaatttaataaccaaatgaaacaagctggaatatgatagataggaagcggtaaataaacatgtacgcttatttgcgtccggcggaattataacccgcttaatcattaccgttttccggttaaaataaattcaaccagcttattaacatcatcaaatgtgtcataatcaccataaattccctcacgatgatatacaaccccgtttttctcattttcttccaaacaatcgagcagcttttccaccccatacctttttatgaacataataaatccttgaggcttaatttttgctaaaagccctttcttacagttttccgtgcaggaatagcagctggaaacccctttttccattgaacagcttctgttctcacaccattctttatcagggcattcacccgaattgcatccggaacaatggtcattttcagaacataagcagcaggccagcccacatctcgcaattcctaattcccttttcattttcagccatctacctttcctgtttgtttacaccggacaatagcgccacacactccacgtgcgccgtccttgggaacatgtctacgggcgtaagctcctcaacccgatagccgctttctgaaaacagcttcaaatcgcgcgcgagcgtcgccgggtcgcacgatacatacacgacgcgcccaggcgccatctgtacgaccgtatcgattaattctttcccgcagcccttgcgcggcgggtctaatataacgacgtcggggcgaatcccctcgaacgcaagctgtttagcggcctgcgacgcgtccgcgcataaaaaccgcgcgttctcaattccgtttttccgcgcgttctcgcgcgcgtttactacggcctgctccacaacctccacgccgatcaggcgctttgcgtccttcgccatggtaaggccgattgtccccgtcccgcagtacaggtccagcagcgtttcattgcctgtaagcgcggcgtactcctttgctttctcataaagccgctgcgcctgcgccggattgacctggtaaaaagacagcggggaaatttcaaatgtgagcccgcaaagccggtccgtaattgtatccctgccccagacgagacgggatttgccgcccaggattacgttcgttttatcccggttgacattgacagccagcccgcaaaagccttttatcttttccgaaagcatccgcgcaagctccgtttcccccttcaagccgttgccgtttacaacaagcacggcaaggctttcccctgtgctcctgccgcagcgcaggtacaggtggcgcagcttccccttatgggtaagctcgtcgtatggctcgggcttgtatagctccgcccattccctgaataccgcgattatatctgaaaaaaccagcggctggagcaggcaggtaccgcagtcgataatccggtggcttttataggcataaaagcccatggaaaggccgccgtctctccccgttcccacaggaatctgcgccttgttgcggtaatgctcctgctcctgtgcgctgacaatcgggctaatgcgcaaatcatgaaagccgccgatacgctccagcgcgtcttttacgcgccgctccttaatctcaagctccgcgccatagcgcaaatggcggtaaacacagccgccgcagctttggaacacgggacagtccggctctgtccgcgcgggcgacggtataataatttcttctattttaccgattgcataatgctttgacgtcttgataattcttacgtttagctcatctcccggcgccgcgtttgaaacaaacacagccatgccgcgcgcacggcccacgccgctgccctccgccgtcattcctgtaatcgtcagctttaccgtctcgttctttttcagtgccgtctgttccaatgctttctcatccgtttcttcatggttttaggccgccgcgtcaaagctgccgatgatgcccgctatcagcttttgaatctcgattgcgtcgcgcacgctgattacgccgtcaaagtttacatccgccgcgcttgtttccgtctcgttgaaatcgagtaaccgcacgacctccttctggatatagagcacgtcgtctatcttgatgcgcccgtcgccggtcgggtcgcctttggcgtaaggctccacaaccgtcctgtcttcctgcttgatatcagtaaaataaatattgtcctgtaaatatggcttctgtttcagcgtataggcaagcttaccgtcccggaaagcgattccgaaaatgtaccctttcgaaatatcggccgcaaacacttcctgcgttgttttgcttgccggatagtacgcgtaaattttcttttccgtattgtaataaagaacgttcccgcctgcggctatatttgcaaagctcacattatatgcgtcgttttctccccataccatccattgtgcatactgaacaggaagcttttccgcctggttcgccgccatatcgcgcgaccaaaggttgaaatccatatccgtgtaataataacgttcgccaatcggaaggattgcgcttgacacgttgttccaaaaagcgttgtcatacttggtatcgaccgctttgtagggagaagtccaaccagtatggtcgtagcccttggaagaaataaccgcgtcgctcttcaggaaaaacaggtggtcggcataaccaagcgtgtcaggtaccgggtcgtcccaggtaatatcgacatggtaccagctggaaccgagctttatcatgttccaggcatggttcatttcctcgctctcaaccacaatacagtcgacgccgagcctgtcaagcaggtctttatacgcgagcgcgtagccctggcagactgccttttggctgacaaggcagccgtaagcgttataagggaacacatcgtcgccgaccgccgtttcgtcatactcgcaggaaagtgcgatggcgtcgtgcagaacaagcgccttctccatgtcggtcggcagggcttccacctgctttaaaagtgcggaaaccgcggcctcatattttttctgggcctgaggcagctcgtttttcggaatcacatacttaaacataagcgtagtgattgtattcgtgtacgtataatattcgtaatatatcgtattggacatatagtaaaactgcgggttctcgtatatcagactgtccagcagctccccggcacggctgaccggtatgttataaccgctgatgtcaacctcgcttttataattcttcaccgcgctgaccacagccgccagcgcctttcccacgctgtcgtttgcagcgcgcaggccgtatgtataagcgcctgtgctttccggcagggttacgctgccgtatccgagcggctcttcagacgataccgctcctaagatgcccgaaccttcctttgctgcgcctgcaggaaaagccgcaatacctgtaagcatcaaaaggctcaatagtacacataataattttttcatttggattccctccgtatcaatttgtcggccccgccgtatggaccctgcattcccaatgtggaagaatgttactctgattatagcatcacacatacggaaaaacaattgcggcgttccctgaatttttacacaccggtacagtatttttccgttttttcgtaaagcttgcaacaaaagggcaaaagtttgccggaaaatgaaaaaactatttattttccggcggctgcgtactataataaaatgtactatgtttggattggaagtgtttgtttggatactgataagcttttggataacgtcaagcacgttcattttatcgggattggcggctccggcatgtgtccgctggcagaaatcctgcacgcggaaggctttgaactgagcggctcggacgtaaacgaatccgacacgctggacaggataaaaggatacggcatcagggtatccatggagcataaagctgaaaatatagaaggcgcacagctcgtcgtctacacggcggctgtcaagaaggataatccggagcttgtagccgcgattgaaaacgggattccggccattgaacgttccgtcatgctgggtgccgtcaccaggcggtacaaccgctccatcgcggtcgcgggcacgcatggcaagacgaccaccaccgccatgctttcccaggtgctcatcggcagcggcttcgacccgtcggccattatcggcggcaagctgccctacatcggcgggaacagctacgttggccagtccgacatcatcgtctgcgaggcatgcgaatatgtagacacgtttttgcagcttacgcccgcaatctccattatcctcaatatcgacgccgaccacctcgactactttaaaaacctcgacaacatcaaaaagtcttttcgtaaatttgccgggcaaacaagccgcctgctcgtgttaaacggcgacgaccaaaacacgctggacgcagtagacggggtgagccttgacaagctgctttacggttttggtgagcataacgattaccgcgcggcaaaccttacggtaagccacggtgcggtccagcatttcgatgtgatttaccaaggcgaaacgcttacgcaggttacgctcaacgtaccaggaaagcataatgtgttaaacgcgctggcggcttttgccgtggcgcaccatctgggcgattcccccgcgctgattgcggaaaaccttgaaaaattcacaggtgtgcaccgccggtttgaaatattgggaaagccctgcggcataacggtagcggacgatttcgcgcaccatcccacggagcttacggcaacgcttaccgccgcgatggagatggggtttaagcgcgtatgggcggtattccagccgcatacctattcgcgcacagcgatgctgcttgacgatttcgcaaaggctctttccataccggataaggtcgtcatgtcggaaatccttgccgtgcgtgaagaaaacacctatggtatctacacaaaagaccttgcagaaaaaatccccggcagcgtgtggttcaacacgtttgaggaaattaccggctacatctgcgaaaacgcccagcccggcgaccttgtcctgacgctcggcggcggcaacgtatatatgtgcgcaggcatgattttaaaggcgctcaacgcaaaggaataccacggtcaataacacaataaaaagcacagtcccctccggggtatgccggaagggactttttcatatgcggataaacacgaaaaccgggcggggtaaatcccgccctgttttctatatcaacatgtaagaaagaggaaaaatgaaaagaaataagcgtaatggattagaacaggttgttaagaaaatcgtccaggcttccgcctccggtattgccgtcgcccctgccggaatagctgtcgtttccattgctgccgaatccgttactgttatccgtgctggaatcgccgccagccgccggaacgctttcttccagcttcaggctcagctcgcccgtctggccgccgcggcttaccttgaccttggccgtgtcgcctaccgaaagggatttcaacgccttgttgatttcgtcggtggtatttacctgcgtaccattgatagaaacaatcctgtcgccgcgctggaagcccgcgctttccgcgctggagccggagttgacactcaggacatagacgcccgtttcattgacgccgtacatcatggccatctgctcggatgtaatatcgagcagggacattcccaaatctatctgccccctgacatagccgtactgcgtcaggtcgtcgagcacgtctgtcacctggctgaccggaatcgcaaagcccaggccctcgatttccgttccggtggattttgcgaccacaaggcctatgagctcgccctttgagttgaacataccgccgccggagttgccggggttgatggccgcgttcgtctggagcaggttcatagaaacgccgtcaatcgtaaggtcgcggttgagtgcgcttacgatgccgtctgtgacggttccgccaagctgtccgagcgggttgccgatgacaacagccttttcgccgaccttaatggaatcggaatcgccgaacaccaccggggtaaggccgctttcttctattttaagcagtgccacatcgaccacaggggaagccgtaccgataagctttgcggtatagcttttgccgtttttcagcgtaacggtgattttcgacgcgccgtctatgacatggttattcgtaacgatatagccgttttccgaaacgatgacgccgctgcccgcgccggattcaatatactgctgcgcaaagcttccggtttttactacctcggttgtgatttcgacaatgctgtttgctgtcttttccgctatttgctccgtcgtcatcgcgtcgccttcgctctcagtggcgccggaggccgtgttgatgaccttctggatagtaaggccgcttccggagggaagcacgccgctttccgtcaggttatccgcaagccatccgccgccgaacccgacgactccggccgcgagtatcccaaccgccatcatcccggcaacaaagccgcgcgtggccttctttttttccttcttcggctttttctgcttgccgccctgcgccgtatagggcgttgtcataatggtgctgccgccgggctgtgcgtatgggctctggtaagtaccgtaaccctgctgcgctgtgccggctgtattgctgccgtcgtaataattatactggtaagaggcagcgtcctgctccggcgtttgttccgccgcctgctgctgttcttcctgctttgccggctcattgtacaggtagcttgtactgttgtagccgctgtaaatgttttccggctgcgctgcgtccgcacggcctgtattttctgtggaggaataggaaccggagccgctgcctccgtccggcatatagaagctttgctgtgacgcgtgcctctgcgccgcctgttctgcttcggatggcgcggcctgcatagggtcttcaaaatggctgctgtatgtttcgtgctcgttcgtgggaatgctgttttcatggttttcgtttccgccgaaaggctcgtaaggattgttgttcataagatgacctccgttcgttttttaaagtaccgctttgaaagccgtactggatttttgtagccgctttgtttttgctgtgactatatcttacccattgttcatgtcggaagtttgaaaatgaaatgaaagattgcttaacttaatgcgaacaaattatgaattgggccgaatgcttttcttcttgaacaataggcgtttctccgacgtaagcttgtatcttttgccgaaggatggtataataacggcatgccgtataaggggttatcccgcgcggacgcataaagattcatgaaagacacggggtgtttgatatgttgaatgaaaaagtagcaaagcttttaaacgaacagattacgaaggaattctattccgcttatctttatcttgatttttccgtctattattccgagcagagcctcgacggctttgcaaactggtacaaggtgcaggcgcaggaagagcgcgaccacgccatgctgtttgtccagtacctgctcaacaacggcgaaaaggccgggcttgaaacgattgacaagccgcagtggacggccgatggacacatggcgccgcttaaggcgggccttgagcacgagcggtacgtgacgggcctaatccacaatatctatgacgccgcttatgaagtacgcgatttccgcacgatgcagttcctcgactggtttgtcaaggagcagggcgaagaggaaaagaacgcggaagacctgataaaaaagatggagctgttcggtaccgacccgaagggcctttacctgctcgacagcgagctcgcggcgcgcgtttacaccgcgccgtcgcttgtgctctgattttgcgttccatataaaataaaccgctcccggctgttttatgcctgccgggggcggttttctttttttgtttcagttttgtttgtcaggaagacatatagttctggatagcaagcacgtccgccgtgccgactgctccgtccttgttgaagtcggcggcaattttctgctcctctgtgaacgttatcttgcccgcaaggtagttctgtatcatcagcacgtccgccacgctgacaattccgttttggtttacatcgcccaggataaccgtttttgtggcggcggtaaagtaccatgttccggcaacgacgtttgaattgtttgaaaccgccgtgcagcgcagctttttgccgaaatcggcgctcgctactgtataagaggcgttcgtcgcccctgtaatttctccccattttccggtgctttcgttgtaccgctcccactggtagcggatgccgtagcctacatctgacgggtaggagtcggagtatttaaggctggctgtcagcttttcccccacggcagggattcccgtaagcgtctgccctatcacgctcgtctgcgggttaaccgtgtagattacgtctgtactgtcgctgaaagagagatgcagggtagtcgggtaattgcgcggcaggcttgacaggaaactgttctggaaggtaatggaatcgccggaaagcgtgtaatccctgtcttgcaggaggacgcttccgtcgtttttctggatgctatggagcaggttgccgtttgaaatgatttccgcggtcagcgcggtaccccgatagatgcggtttgtcggatttattttggaattttcaatgccgctgtcccgctttttcagcactgggcggatgcagaagttactttttattatggattcttgagccgtcacatcttcccacttttccccaaggtacacgtagctttccccttcgttacaggaggcgctgtaatatgggccgtctgcttcataaaataaccgtatccatttcagttgatttggcgtatagccgacgattaccgcgtatttccccgcgtttgagggaagtatgtacggcggagcgctgatttcgactgttttatacccctgcgccgttaccggtccgctcgcgagcggcctatcgtttggtgaaggggtcggcagggttccgtccgcgttgagcggcttgatataaacataataccaacagcccggggattcttccgggggacctgcgtaaaacatcaccttgcttatctgcccgtattcatcggcaagctctgaaaaatcgtaaacgttcgcggtataaatcattttctgcgagatttgagtatatgttctgctgctttctatcggcataaaatcgtgcgacagcattttttcgtcctgatttgcgggctccacgcccgtgatggcaacgggaaagttcattttattattgttgaaatatttatcctcataggagacccagaaatagccgtcctccccaaagcctgtgccatagctgtttttaaccagccacgcgccgttatgctccggctggcggctgaactttgtttttgaaaagtcatcgtcccagccgacgacggtgacggcatggttcggcgggatatccttaggcggagaaacgcccggctgcttgtctatttgatagacgttcagggcattgtaaattttgttataatggtcgctgcgctgcgacatatagaggtccgcgctgaccgcgccgaaccttaatatataatccttgattttactgatttcgacctcttccgtgtcggtcacatggatgcggccgcgcgcgtccatgttctgcggccagtttaggccaaaatcatccttgtaggggacgtcctctgaagaaacaggcgcctgccaggtgacgttccgtacatttaaaatcggctcgttccagtttgtcaggtacgcgagcgccatcggcatgttgcccgcaatatccgcacttcttgtataatatcctttttgacttagaagtccattttgttttcttaattcgtcgctcaaaacaaaccgcatgtgctgctctgaaaaggcctgcttacgcccggtgaggcgcgttgcggccgcctcaaggcaggcgtttgccgtaaacgcccagcaaacgcctaaattcccctgttttttggctggcgtaagccacccgccgccgcgcgggtcataaaaagagatagccgtaccgacatagccctcgtcgtcggcatacgacggcgtgaccgcccgcgggacgacgccgccgtattgtgcggtgtccccgtttttatagtcttccaggtactgcagatattccggcgtataattattttcagaactgtcaaccaaaaccgcctcgctgctgcccgcttgtactgtcgaagcgttggcgcacacaccagccgtcccagtgacgagcagaaacatggccattaaaaaggtaatccacttcctcatactttcatctcccgttctttacatttaaattaactttccctcatcaattaacggattataatctctttcattaagcgaaatcaatccagtgctagcgaaaaatatatccacaccagcaatgtatttctgcatcatgataacattttctgttgtaatggttcccgccttcccgttgccaaaatcagcaacaattatttgtgacgagttcatcgggacagcctttgcgagatacttctgcaggtacagcacgtccgccacttcaacccttccacttccgttgacgtcgcccgtcacctggttgcttttgcataatgtattgtaggccgcgcgcagcgcaaaatacgcgcccgttacggagtcgtcgtccggggctaaaagcacattcgccgctaactgccgcgccgcgcagaattcccgccacatccgctccggataataacgggaaagatagccctccgtgccgttttcttccccttttaccgcatcgtataattcccgcagtgggagaacgtctactttcaggccgtcatacgccgcttcaagattatcataaacgtcctgaagctcctctacagaggtgccttcccatacatatgggtccatgtacttctttgcgttatcgagctggacgtccaaatcatacaatgtctgagccgtataaattgagtcgcccggccttcccattgccgggaatttctggctacccattctatacaggtcttccatattgttgtaaagccgctgtcttatctgctgttcctcctgttcctcatccgtatacgcggacgcgcccattaccgccgtacccataagcaggcacaggcatagcagtaaggcaattgtttttttcagttttttcatgcatgtcatcctctttcttttgtttttttatgttaccggctctttggaaccggatgatatatgaaccagcagccagcaggagggtaatccacttccctatactttcatctcctgttctttacattcaaatcagctttccttcatcaattaaagcatttttatcaaataaccgtatatcacttaaattccaactatgtaatttctcttcatagcctgcaagatacctttgaattttcataacatcttccatcgtaatttggcaagtatacaagtcattcaaatttgccaccgtcctttgtgaagaattcatcgggacagcctttgcgagatacttctgcaggtacagcacatccgctacttcaacgtaaccgtttccatcaatgtcacccgccacctgatggcttttgcataatgtattataggccgcgcgcagcgcgaagtacgcgcccgttacggagtcgtcgtccggggctaaaagcacattcgccgccgtttggcgcgccgcgcagaattcccgccagatgcgttcgttataataccatatggcggtaagccctcccgtgccgttttcttccccttttactttatcatacagctcctgcaaaacgtccgcccttaccttcagcccgtcatatgccgccttcaggtcgtcataaacaccctgaagctcttccactgggcataattcccatataatcccactgctcaggttcatgtaattccacgcgttttcaagctggacgttcaaatcatacaatgtctgagacgtgtaaattgagtcgccttcccttcccatcgctgggaatttttgctcgcccatactatataaatcttccgtatcgttataaagccgctgccttatccgctgttcctcctgttcctcatccgtatacgcggacgcgcccattaccgccgtacccataagcaggcacaggcatagcagtaaggcaattgtttttttcagttttttcaatataaacacccctttttattttttaaatcctgatacatttttctatatttattttaaccctttatttataccatgtcaatttaattcatgtcaccatattgtgacgatattttacattaattgttttttattatctcaatttccctgtaattttgccgtcttgcttttatatttgaggttttaccggcagaaagcacgtaagctggcgctatctttaaaaaacgtggttttatttcccgaccatatgttctattatcccattgaccagcacgaacaaaagttctataatcattataaacatttgttcgattggagatgcctgctttgtccagaactattttgcacagcgactgcaacgccttttacgcgtctgtggaatgcctaataaacccgcgcctgcaaagctattgcgtcgccgtatgcggggacgtccaggcacgccacggcatcatcctggccaaaaaccaaaacgccaaggaattcggcgtaaaaacgggtgagccgatttggatggcaaagaaaaaatgcccgcagctcgttacggtacaggccgacttcgcgcgctatctggaatttgcaaaacgcgtgcgggaaatttatttggagtacaccgaccgggtagagccgttcgggctggacgaggcatggctcgacgtaaccggaagcgcccgcttgttcgggagcgggaaagctattgccgaggaaataaggcggcgcgtcagggaagaaataggcattacggtaagtatcggcgtaagcttcaataaaatatttgcaaagctcggcagcgactatcaaaagccggacgcggtcacggtaatctccagggacaacttccgggagatagtatggccgctgccttcaggcgagcttttgtatgtcggccccgctacaaaaaagaagctcgccgcaatggggatttacacaattggagatgttgcgcgctgcaggcaggagctgctgcgcggcaatctcggaaaatggggcgactggctttacacctttgcaaacgggctggacgcctcccccgtcgcccgctacagcgaaataccgccgcccaaatcgattggcaactccgtgaccgccccgcgcgacctgaaaacgctcgacgacgtgaagattattttcagcgtcctgtgcgacagcgtatgccgccgtatgcgcgagcaggggctgcgctgtaaaacggtaagcatccatatccgggacaacgagctgcacaccctggcgcgccagtgccggcttgaccgcgacagcagtattacaaaggatattacagacgcctctatgcgcctttttcaagagcattaccacaaaaagcaagccatacggagccttggggtaagcgtttctgattttacgcggtgcgcgcagggcgtgcagctctcttttttcggcggcgatgaaaaggagcgcgtacgccgggaacagcttgacgatacggtggaccatttaaaggaacgtttcggcgcctgcgccatatgccccgccctgcttttaaaggaccggctgctttccggcttcgacccaaaatcggaccatatcatccatccggttggctattctttttgataaacaaataacaatcgaattattggtattttttatttattaattttaaacagttgtagatttaaaaatatagttaatcgtacaaatttacaaaaacatttcaatataaacgttttattatattgactttatctatatttgtagtataaaataaaaaagaagggtattttgcaaaacacatccaaaaaacaaaaacaggaggtagattatgtctaggttcaaaagaagttcgttaagcatcctgcttgctctaagcatccttgttaccttcgtctgctcttacggcggcgtaacagcggctgcaaacgacgcccccgcccccgccatatccagcggcacctacggccttgcgcagaacatacaggacggcgttatcctgcacgcgtggaactggtcgtacaacacaataaaaaacaacatggccgatattgccgcggcgggctattcggcggtgcagacgtcgcctgtccagcagccgcgcgattataacgcttcctggacacaggtcagcagccagtggtggaaatactaccagccgctcgacctgacgtttgcaaccgagcatacctggatgggcacgccggccgagttccaggcaatgtgcactaccgcgcattcctacggcgtcaaggtgattgtcgatatcgtcgcaaaccatctggcgaacgacagggacggcgcgggcaacgcggcggacaaccggaacagcggcattcccgcatacctgcgcaacaacgacagctactggcatatcaacaccatctgggcaagcgactcaaaccgctatgatatgactatgggctcgacaggtcagcccgatttgaatacgggtaattcggcggtccagggctttgtcatcaacctgatgaaaacctgtatcgataaaggggccgacggcttccggttcgacgcggcaaagcatatcgaggttcccgaagacccctatggcgcaggcagcaatttctggccgaacgtcacaggccaggtaagcgcctacggctctacgaaggggaagaatatctattattacggcgaggttctcaatacggcgtctacgcccctttccaattatacggaatacatctgcctgaccgacaaccagaccggcaacaacgtcaagtcaaacgtcttgaacggaaacgccgcgggcgcggcggcatccggctatgtattcaatctcggcgcggacaagaccgtcctctgggcagaatcgcacgatatttttgccgataaccagtttgtttccaataccgatattatgctgacctgggcaatcgtcgcttcgcgcgccgacgcgacctccctgttcctcgcgcgtccctggagctataccggcaacgaaatgggacaggcgggcgatacctcgtggaagggagccaatgttgccgcagtcaacaaattccataattattttgtcggccagggcgagtacctgagcaacaacggcagcgttgtgattaacgaacgcggcaccaccggcgcggtacttgtaaatttgagcggcggcagcgtaaacgtaaacgcgcaggcaaaccgtatgatagacggcacctacaaagaccaaatttccggcaataatttcaccgtttccaacggaaggatatacggttcgattacaggcaaaaacattgctgtgctctacaataccgcggcttcccccggcggcacgaaaacgctttacctgcaggacaagctgggctggggctcttccgccaaagcatactgctggaataccctgaccggcgcaaagaacgccgcctggccgggcgtttccatgacatatgtaaagacgacgcccgacacgcatgaaaatatttataaaattacatttacagacagtgcttacgattacattgtttttaccaacgggagcggccagcagacggtagacctgcccaccgcgacgaacggctccgtctattattgtacggaggccgcctcctcaggcaaatacaaggtaagtacctatccgtccacatagaggcgccttcggcccgcttctctccttaacaggaaaggcagccggctgctggttttatggctagcaggcagaataaacgccgtcccgtatttttgtgcgggacggcgtgttcttttacacgattatttccggggaaacaaagaccatttttatacttttatcgtctgtctgaaaagatgttcctttgataaataaataacaaataaaccatttgctctttttacttattaaatttagacagacataaatcagaaattatagcaattcgtacaaacttataaaaaatttactataaattaaaacgattacattgactttatccatattcccgatttaaacttggcttgacgggtattttgcaaaatacatccaaaaaaacaaaaacaactaaaaaaacaaaacaggaggtcattatgtctaagtttaaaaagggggcggtcagtattgtactggccgtcagtatcctcatcaccttcgtctgttccttcggcggcgtgacggcaacggcttcttcctcgctcaattcgcaggggcttgcaagcaacgtgcaggacggcgtgatactgcacgcgtggaactggtcgtataatacgattaaaaacaacatggcaaacatcgcggccgccgggtattcaacggtgcaaacctcaccggtacaaaaaccgaaggattacggcgccacttggacgcaggtaagcacacagtggtggaagctctaccagccgaccacccttgaattcgctgacggcggcacatggcttggtacaaaagacgaatttgaaagcatgtgcgacacggcgcattcctatggcatcaaagtcattgtagacatcgtagcaaaccatatggcaagcgcgggcggcggcggaaacaacgcttcaaacaggaatacgcagattccgtcggctatccgcaacaacgacaattactggcatgtcaacaatatcacggcaaacgacggcagccgctacgatatgacgcacggctacatcggcatgcccgacctgaacaccggaaacacggatatccagaattatatcatcaacctgctcaaaacctgcattgacctgggcgcggacggtttccggttcgacgcggcaaagcatatcgaggttcccgaggattcctcaggcgcgagcaacttctggccgaacgttacaagcgcggcaaaaaattacgcatcgcaaaaaggcaaatccctttacatgtacgcggaaatcctcaacaccgccagcacggccctgacgaactacaccaagtacatgagcatcaccgataaccagaccggcaacaacgtcctgaacaacgttatcaattccaatgcttcaagcgcagcaagcccgggatacgtattcaacgtcggcgcaagcaagtccgtcctctgggcagaatcgcatgacacgtatgcaagcgaccagacgacgctgaatgtcaccgaccaaaacatcaggctggcctgggcaatcgtcgcctcgcgcgctggcgctacctcgctcttccttgcacggccggcaagctttacaggcggcgttatgggacagtcaggcaacaccacgtggagaagcagcacggtcgttgaagtaaacaaattccacaacaagtttattggccagagcgaatacctaagcagcagcggcagcgtcgttatcaacgaacgcggcacttccggcgcggtgctcgtcaacctgagcagcagctccgtaaacgtcaacgcgaccgcaaaccgcatggcctccggcacctacaccaaccacatttcaagcggttcctccaccttcaccgtatcgaacggtaaaattaccggaaccatacccgcaaaaagcgttgcggtcatctataataccggctcagaaccgaccaacccgccgactgaaccgaccgatcccccctccggttcaaagacgctctatttccaggacaagctgaactggagctccgtcaaggcgtatatgtggaaggattcgagcggccacaacaacgcagactggcccggcgtcaatatggcatatgtggagacgacacccaactccaacgagaaaatttattccattacctttaacccggacgaatttgaccgtatcatcttcaccaacggcagcggaacgcagacggtggatatcgtaatggggacaagcggtacctgttactactgcaccacggcttccggcggaaaatataacgtcagcagctaccaatatacataatcgccaaaaccggaccggccgtttttgccattgccagtaggcggtgaaaaaacaaaacggcattccgttccccaccccgtatgtttgccttcttgcatacggaatacgggcaagcgccgccaatgggacattccccatgggcggcgcttgtttatgcaaaaaagggctggagcggccctttcccgtcccagccctttattttcagattttatctgcagaaataaatataataatcgccctggcgcgccttgaccgcttcccgtccgttatagtcggaaacataatcaaacgtatcggcagtgccgttctgataggccacatggacgccgcttgagtctaccgtatacgtgcctttatgagagctgttgtctttgataatgccgacgccgacgtagaaggtgccgtccgcgttgaggtcgagcgagccgccgtaggaaaggccggttccataaatttcactcagctccactggattgcctgaggccgcgctttctcccatcacgggctcccagcttcccgtcaggtccggaatattattctgcggcccgctgtccgacgagcttccaccctgcggctctgtctgggaaacctgtacctgtgtttcctcctgagaagaactgccctgtgtttcttcctccggctgggcaggctgtgtggcagcctgcgtgccctgcgtcggctgcgtgggcggcaaggagcttaccgcttccttttcgtctttacagccgttaaaaaatacaatcgccgtaaggcacaggataagcgtactcaccatccaaattcttttcatatgcttccctcttttccattcgttccggcaaacgccgttttcatggtaatcttacttcctatttccctttctgtcaacaaaacttgcaagattttgaacggttatgacaagcttgtcacagaattacgcgatgtcttgccgccgttaaccgttcaggtcctttggacttcgcctgctcctaaaagacgccgcggagccgcgggttttgcgcataatacagttctattgaattaacctttgtccgcgccgggaacacgaggccgcatggcatcatacgcggcctttaccgcatcctcgctgatattgcagcgcagcacataaaccgggacggaacttaaaaaactgtcgagcatcgcaaggatttcctccatgacggtgcggtcagcggagcgcataatctgcgtaaagacgcgccgcaccgcttcgcggctttctattttcctgatggaattttccggcgcgcgctccaaaaagcaaagcgcctgtaccggaaccatcgcgttcctgctcaaatcatgcttgccggaaaaaggagtgccgcacgcaagatagccgctatcaccctttcgcagcgcgggcttatcgtcgttgatgagaaacgcgcgtccctttccaaaatactcaagccatagccccgtatgggtggacttgcccgttccgctgtcggcggagaacaggtatgccctgttatcgagcgagacggcggacgcatgcagaaaaaaaccgccgtggtgaatcagctcacagtaaaagcggtacccaaaccacgtatattcgctgctgtccaccggataatcccgataggacttcagccattcttcaaagccctgcgcctgcgggtcgatgataatatcgcaatccgcccttttcatactgctgtccgttaaccggtactgttccgcgcggccttcaagcaggctgcagcgcggctccataaatacgtttaatccggcaatccggtaaacaggcatcccatatcccccgtttcttcttatctgtttacttcctccaggcacataaacgccgccatccccccgcgtttgccgcctgtcgcccggtgcgaccaaagcagcccgctgttgcagcgcgtgcatacgtcgcttcgcgtgatgttttcctttggcacgccggcgccttcgataacctgcctgtttgcctccagcaaatcgagcatatattttccgtccttcttcgggaagatgaatttctccgtgtcaagcccggccatcgctttaaaatgggagcagcagctctcgtcgacttcgtagcagcatttcgagattgccgggccgactgccgccaatacatcttttgggtctgtcccataatgctccctcatgcaggatattacctgcgcgccgatgcgtcctgcagttccgcgccatccagcgtgggccagcgcgattacgcgccgtttcgtatcggcaaaaaaaagcggcgtgcagtccgcgtaataggtgacgagcgtgacgcccggctcatctgttacgagcgcgtctacgctctgcatgtcgcgcggccttgtaatcccaattcccttttcctttgaagtaacgcgccgcacataggtatggtgatcctgcgcggaagctgtcaggctatcaaaatcgaagcccgccgactcacagaacagcctgtaattttgcagtacgttttcgtccgcgtccccgcgcccgaagctcaaattcatggttgaaaattccccggtgcttacgccgccaaggcgcgtggaaaacgcatgccttataaacggtacggcgctcaggctgtcaaatgtaaggtaagcggcgccctgcctgttgtgcagccgcattgtatcgcttttgaaatccatggaaaacctcccgaacgcgttttatctttcatgctttacattataaacggaaccatggtataatacaagcgaaaaacgtcataggcaagcggggtcaatacgatgaaattctacaggctttttggaaatcacatcgaaccaaactgcgaatactgcgacaactgcatcgaaaacggcgaaggcgtaaccatatgcagggcgaaaagggaaataaaagacggcaagtgcttccggttcaaatataaccccttgctgcgcgtaccgcatgaaatgccgcgcctgccgcagtacgacccgaaggattttgagctttaaatgaatctgtgttaaagatgcaagcctcagtgcttgcgtacctggacatggcagcggactgcggcttcgatgaggaattgacgctgctggacagcatcacgcagaagctcatcgcgaaattgccggtcatcattccaaacaagtaaaaaggcatatgagaggggggatgttatcccccctctttttaataataaatggagcgcgcccgaagccttgcaagcgcccgcttaatatggcgcgaaaccgctgaggtgctgatgcctaaatcttccgcgatttccttcatcttctccccaccgaaataataggctgtaaggcactgccgctgcctttcggtcagctccgcgctgagcgcctttgccataaacgccttcatgcgcttaatatccccaaggttgtctccgcgcatattgtactgccgcagtacatatagctcgtcggtaaacctgtcaagagacagcatcctgttttccggcataggtaccgcctcctcttctctgtaaaagctcggccgtatgccggcagtcaaggtacatcgagtataaaattgctgccctgcggttgtattccatcctgttttcttcgttttcttcctctctcttcatcgcgcttagcttctcttttatcttttgcgcctggactgcataatcctcggcccatgctttataatccataattccctccaaattttctgcaaactgcataatccggattgaacggcttgcccggggcggtggctggcacgccgtttttccttgaggaaatcatatcacgaactaatgttcgattcaatgaaatgaacattccgccataaaaacagccccctgctgttctgtaaaacgaacagcagggggctttcttaccaaatgtcatagaataaaatagtataagctgctaaaataaagagtcacatgcgtttaaacgcgattcttcaaaacgggaacattgatacggcccatcagcttttgcgcgccaaacaggagcgccgtattcacaggcaggagcgacaggtaattgacaatcctccacggcagaaggacctcaagcggcgtgccgtacatccagaacaggctcgctgtcgtaatgataaggtcgcagaaaacggttgtcacggtgcaggcaaaaatcgtgcgttttaggcttaccgggcgcttgtaaaggataaggcccattaaaaagcctgaaagcaccttgcttaaaataatacccgggttgattgcgccaatcggtttgatgatgagtgttacgatatcccccaagccgccgagtacgccgcccgcgatggggccgaacagcgcggctcccaaagaaaccggcagcgccgcgaaggaaatgcggtaaacgctttcgatgttgatttccaggaagccgagcacaacgcgcagcgcaagcaatatgccgcagagcgctaccatctgcacgctcccgaattcccggcaggacgaacggattacatgtcttttttctttcattttgctgtttgctcctttcttttttgtgctgcaataaggagtaacgcaaaataaaaacggagcgggaaaggcatacgccaaagctccgctcctaaagctccgcggctgaaaacagccgtttcatccttatggtacagcgggatgcgaatcctgaaccgcagggactaggcccgtttcgtccgtctgacaactccccgttcagacggcactgtacaccataatgggtgccacgcgcaggattctactctgtaataattattttttgtgcgggaatgcacgtctgttattttaacagatgaagggttgtttgtcaattgcacgccgcttccttttgtcacaaaaaagaaaaaatacatataataaaacagatgctgttttaaagccaatctctcccccgtccggtgataaagaatagaaaatcaaaaaaagtttttcgaaaaggcattgacaaataaaaaaaggagcgctatacttacaacaatttcaaagacaaaaccgctgaacaagagtagtaggaaaaatacagcgtttccagagagccgttagctggtgggaatacggcagcaatgttttttttgaatggacttgtgagggcagcctgaaaccgtattgcgggagtaggcgctgacgggaattccttcgccgttaccagaaaggagcgtatgtcagtacgtaaagtgggcgttttacgccaatttgggtggtaccgcagaagtttataaaagcttttgtcccttttcggggacgaaagcttttttattttacccaaaaacaaaaagaaagggtgataacaatggtcacaccgggctttgagcaggtaaaagcgattgcaaaggattacgacgtgattcccgtctgcaaggaaatttacgccgatttatgcacgccgattacgctgctgcgccgtatttcacgctataaaaagaattttttccttctggaaagcatagaggattccgacaaatgggggcgctactcctttttgggctttgacccgaaggcgcgcatttactgcaaaggccatgctgtcaccatcgaaggcgagggcgaacgcgtcataaaaacggaccatccctttgaagtgctcaaagaatatctctcacactataaaacaccgcgcttttccggaatccctccgtttaccggcggccttgtcggatactacggctacggcatgattggttacagcgaaccggtgctgaagctcaaaagcggcgatatgaacgactttgatttactgcttgccgacaaggtaatcgcctatgaccacctcaaacagaaaatcactatcatcgttaatatgaaaacggacgatttgacggcgcaatatgaaaaggcattaaacgacatccagaacatccttgacctgattatggacgcggcgccgctccccctgagcgactgcccgcgcggcgcgaaattcacatgcaacgtcacaaaagagcgttattgtgaaatggtagagcaggcaaaacgccatatctacgagggagacattttccaagcggtcgtctcccgccggtttgaaacgaaatacgatggaagcctgctgaacgcttaccgcgtactgcgcacgacgaacccttccccctatatggtgtatctctccataaacgggagcgaaatcatcagcacctcgccagaaacgctcgtccgtctgcaaaacggcaggctcacgaccttcccaatcgcgggctcccgcccaaggggcaaaacgccgcaggaggacaaagagctggaaacagagctgctgcaggacgaaaaggaactgtcggagcacaacatgctcgtcgatttggggcgaaacgacgtcggcaaaattgcgcaaataggcacagtcgaggtcacggaataccagagggtacaccgctactcgaaaattatgcatatctgctccgaggtacagggcgacatcaaacaggaatacggcgcgttcgacgctatttccgcccttctccccgccggaacgctttccggcgcgccgaaaatcagggcttgcgaaattatagaggagctggaaaatacgccgcgcggcgtatacggcggggccattggttatgtagacttcaacggcaatatggacgcctgcattgccatccgcatggcggtaaaaaacaaaggcagggtaacggtacaggccggcgcgggaatcgtcgcggacagcgtgccggaaacggaatatatcgaaagccgcaacaaagcggccgcggtaatggacgcgctcgtccacgcaagcgacatcgaccgtcataattaaaagggggaagcagcatggttttactgattgacaattacgacagcttttcctataacctttaccagctggccggggaattccggcgcgacatcctggtcaggcgaaatgatgaaattacaaccgatgaaatagaaaagctggccccctcccacattctcctttccccggggcctggccatcccagggacgcgggcgtctgtatcggcgtggttcggcgctttgcagggcaaatcccgatactcggcgtatgcctggggcaccaggcggtctgccaggcgttcggcgcggtaatcggccacgcaaagcagctgatgcacggcaagcaaagcgaaatcacccttgacgcctcctgtcctattttcagcgggcttcctcaaaacgcgaaggtcgcgcgctatcattcgctcattgcgaaaaaggaaacgctgcccggcgtgctttccataacggcacaggacgcggctggggaaattatggcggttcgccaccgcggctgcgacgtgtacgggctgcagtttcacccggaatcgattcttaccccgcagggcaaacaaattatgcggaattttctttccattagataaatccacaatatatgtaaggcttagaaagggctgaaggtattatgattagagaagcaatccacaaggctatggacaatgaaaacctttcttttgatatgacgcgcgccgttatggacgaaatcatgagcggcaaggcgaccaacgcacagattgcgtcgtttttgacggcgctgcggatgaagggcgaaacgccgacggaaattacagcgtgcgcggcggccatgcgcgaaaagggcgcaaaattaaaccatgacttcaaggtggcggaaattgtcggaacaggcggggacgaggctttcacgttcaatatttcgaccgtgtcgtgctttgtcatcgcggcggcgggcgtccctgtagcaaaacacggcaaccgaagcgtatcgagcaaatgcggcgcggcggacctgctcgaggcgctcggcgtccggcttaacatcacgccttcccaaaacgaggaggtgctgcggcagacggggctttgcttcatgttcgcgcaggtataccattcctctatgaaatacgcggcccctgtgcgcagggaactcggcacgcgcaccatcttcaacgtgctcggcccgcttgctaaccccgcggcggctgacgtcaacctcatcggcgtgtatgacgaagaccttgttgaaccgattgcgcaggtgctttcaaacttaggcgtcaagcgcggcatggtcgtccatggattggacggacttgatgaaatttcccttacggacaatacgcgcgtctgtgaaatcaaagacggcgtattgacgtcctacacgctcgacccgcgcggctacggcttttcgctgtgcgcgcccgcggatttgaccggcggggacgcacaggaaaacgcggaaatcgcaaaacaaatcttgtccggcgagataagcccgaaagccgatattgttttactcaattcggcagtcgtcttgtacctcgccggaaaagcacagagcattgaagaaggcgttttgctcgcaagaaaagccctgtacagcggcgcggcgcttgaaaaaatgcaggaattcatcgcggcgaccaaccggttcccgcaggaacaaagcgcctgaaaggagcaacgctttatgatattagacacactggcacaaggcgcaaggcagcgggccgcctgtaaaagggacgccgtttctttggacgaaatcaaaagcatggcgcttgcgttgccgcgcgatacaggctttccctttgaagcagcgcttcgcaaaaaaggaatctcctacatttgcgaagtaaaaaaagcgtccccctcgaagggaatcatcgcagaggatttcccttatcttacgattgcgaaggaatatgagcaggcgggagccgccgctatatccgttttgacagagccggaatactttctcggcagcgaccaatatctgaaggaaatcgcgcaaagcgtctccattcccatcctgcgcaaggattttaccgtcgacgaataccaaatttatgaggcgaaaacgctcggcgcgtccgctgttttgctgatttgctccctgcttgattacaaaacgctcaattattttcttgaaatatgcggctcgctcgggctttcggcgctcgttgaagcgcataccacggaagaagttggtatggcagtaaaggcgggcgcgcgtataataggggtcaacaaccggaatttaaaaaccttcgatgtagatgtaagcaattgtaaaaagctcagaagccttgtgccggacaacatcctgtttgtcgcggaaagcggcgtaaagacgcatggagacatcgattccctgcgcaaaaccggcgcggacgccgtgctcatcggcgaaacgctgatgaaaagcgcagataaaaaaacggcgctcgagatgctcaacggaggcgctttgacatgagtaaaatcaaaatctgcggattaagccggacggatgatatcctgtctgccaatgaatttgtgcccgattacgccggctttgtattctcaaaaagcaaacgtcaggttacagcggggcaggcgcgcctgttaaaagaaaaactaagccctaaaataaaggccgtgggcgtatttgtaaacgagccggtttcctttgtcgccgggcttgtgcaaaagggtatcatcgatttggtacagctccacggcgacgaggacgaggcttatatccggttgttaaagcaggaggcgccctgccccgtcatcaaggcggtgcgcgtacaaagccgggagcaaatcagcagggcacagcggctgccctgcgattatttactgcttgacgcctacagcaaaaacgcctacggcggcacgggtgacagcttccggtgggatatgattccaaaggctttgagcaagccgttctttttggcgggcggcataaacgaaagcaacatcaaacaggcggcacaggaagcccggccgtactgtatcgacgttagctccggcgcggagacggacggggttaaggataaggaaaaaatcaagcgcattatcaatatagtcaggggtgtaggaaatgtctaaaggaagattcggcatacacggcggccagtttgtaccggaaacgctgatgaacgccgtaaacgagctggaaaaagcgtatgggttttacagcaaagacccgcagtttatcgcggagcttgacggtttactgcaagcttacgcgggaaggccgtcgcttttatatttcgcggagaagatgacaaacgatttgggcggcgcgaaggtttacctcaagcgtgaggatttaaaccacaccggctcccataaaatcaacaatgtgctcgggcaggcgctgcttgccaaaaaaatgggcaaaacacgcctgattgctgaaacgggggcgggccagcacggcgttgcgaccgcaacggcagctgcgctgatgggtatggagtgcgaggtgttcatgggtgaagaggataccaggcgccaggccttgaacgtctaccgtatgaaactgctgggcgcaaaggtccaccccgtcacgagcggtacgaaaacgctcaaggatgcggtcaacgaaacgctgcgggaatggaccggccgcgtgagcgacacgcattatgtgctcggctcggtcatggggccgcaccccttccccaccatcgtgcgcgattttcagagcgtaatcggcagggaaatcaaagcgcagcttatggaagcggaaggaaagctgcccgacgcggtgattgcctgcgtcggcggcggaagcaacgcaatgggcgcgttttatgattttataaacgagccgtccgtgcggctgattggctgcgaggcggcggggctgggcgcggacagcccgcaaaacgccgcgacgatagcaaacggaacgcccggcgtgttccacgggatgaaatcgtatttctgccaggacgaatacgggcagattgctcctgtttattccatttcggcagggctcgattacccgggcatcggcccggagcacgcggacctgcatgacagaaaccgcgcgcagtacgtccctgtcacggacacacaggcggtcgaggcgtttgaatacctctcccgcacggagggcattatcccggcaatcgagagcgcgcacgccgtcgcatacgcaaggcggcttgcgcccacgatgaataaaaatgagattatcgtcgtcaatatatcagggcgcggggacaaggacgtcgcggcaatcgcgcgctacaggggggaagaaatttatgagtaatacggccaaggcattccaaaacggcaaggcgtttatcccattcgttacggcgggagacccaggccttgcaattacaaaagagctggttctcggtatggcggaagcgggcgcggatttgattgaaatcggcatcccgttttccgaccccgtggcggaagggcccgttatccaggcggcggacgagcgcgcgctcaacggcggcgttacgacggacgccatctttgaaatggttgaggaaatacgcagggaatgcgcaattccgcttgcgttcatgacctacctgaaccccatttacgtctacggcgtgaaacggtttttacagcgatgcaaggcctgcaaaatagacgcgctgattgtgcccgatttgccgtatgaggaaaagcaggagctgctgccagactgccttgcaaacggcgtcgatttaatttccctgattgcgccaacgtcggaagagcgcgtcaaaacgattgcgaaggaagcgcagggctttctttactgcgtatcgagcatgggtgtaacgggagttcgcagcgaaatcaagacggatattggcgcaatggtgtcccatgtacgcgcggtatcggatattccctgtgcgataggctttggcatttccacgccgcagcaggcaaaggagatggcgcgtcacgccgacggcgtgattgtcggcagcgcgattgtaaagctctgcgggcagtacggtacaaattgcatcgggccggtcatcggctttgtcagggaaatgaagcgggctatttcataaaaataaatatacaggcacataaaaaacgcccgctgccatatggcagcgggcgtttttcctatatgaatcaatctgttgcaggtcagtgcttttcaggctcggggtaatcgacgccgaacgtctcaaccgttacctttttcatgatttgcctgtcgagcgggccgtcgttcatatcggtgtcgcatccggcaatcgtatcaacagcgtcgagcccttccgtcaccttgccgaaggcgctgtaagccccgtcgaggtgcggcgcgtccttatgcatgataaaaaactgggaacctgcggaatccggctgcatgctgcgcgccatcgacaaaacgccgcgcgtatgcttcaagctgttttcaaagccattctgggcaaactcgccgcgtatggaatagcccgggccgccgcatccggttccatccgggcagccgccctgcagcataaagccataaatgaccctatggaaggtaagcccgtcgtaaaagccctttttaatcaggctgataaaattgttgaccgtgttcggggcgacctccgggtaaagctccgccttgatgatatcgccgttctccatttcaatcgtaacaacagggttctggttcatatgctatctccctttctttctaaaaactgttatctattgtaccgtacccggccgcatttatcaacctgttttctttcgagaggctctggtaacgttgaggtgtacaatagatactggacagccggtggaataaaaaggggaaggataggttcgcaaaaaggttttttcatgatataccgccttacggcgaaatgatggattgctttgcaaaatgatgtgccttcgcttcgctgcggcatgatgtgatgtttgcccctatgtcccgcaggacacatcattgccgaaggcagcatcatcgcacgaagtgcggcatcattgcccgaatgggcaaacatcattccttattcctgcccagcctgcctgaaaccctgcatttgacggaccaggaacagcatcttgttaaccgggcaccgaaaactagaatagaatagaaatatggcatgaaaaaaattttggtaaaacaagacatggctgtttgagctaaaatgtggtacaatcttttttgttaaaaaaataacaatatcacagtttaaggaagcgcaggtatgagtataacaacaagaaaatatatcgggtggggcgctacagccctgcttatctgtgccatgatggcagcggcctccttgtttggggaacgggaaatcatctttcctgagattttagcgctcgctgcgggcgcatgggccgcgccaaagcagccgtggcatgtttcgcgcgtacaaaccgtactgcttatgtctatagcagccgtctttggcgtttgcgtcgtccggttcctccccgtcccccagcttttgcaggcggcagtggcttttatattcgtagctgtaatattacttctgacgaagacgacgctcgtgcccatggtctcggcggcggtactgcctgtgctgctcgggacaacctcctgggtttacccagcctctgtactggtgctctcctttatcattgcggctttcaggcccataataaaaggaaaggaagcgtctggcaaaagcagcccctcccctatggaatggaatttcagacaggaggccctgcggtggcttgccctgcttctttgcttctgtgccgcggcgtttgttccggtgcagacaggcaatctctattttattgccccgccgcttattgtaatgttctgcgagctttcaaagccgcagggagcgccgcgcaggcatatgggggccgtgtttggccttatggccatggcgtctgtaaccggcgtgcttgtccgttatgtgacggagctttggctgggcctgcctatctggatgacaggcggattttgcgccgtaatcctgctgctcatgtttgcgcgcgtaaaaatgatattcccgcccgccggcgcggcgatgctcctgcctatgctgctcccggctgacaagctttggctttacccgcctgagctgattacgggctgccttgtttttatgggcctttcctgcctgctgttccgcgataagaaaatgcgcgccgcatcaaaagagccggttggcgggattgctgaggaaggatagcgtccatattttattattaaaagcggcggattgtttctgaaacccgccgcttttttgtatttatttcgttctattaccctgtctttaaaattcactttaaaaggcagggctgcttgcttatgttattccaacaattttacataataatccttctgttcatcaaaaacatagccgtttgccaacagtacatggttagacgggccgttttccttctcaggctggacgataatccgttttgcccgttcctttttccggatggtttcggtcagcagctttaccagcgcttttccgtagcccttccccaaataggcttcatttccgattaaataatctatactgaacgtatcgccgcgtttttccaccttgtaccaatcctccataccactgccgtcaaagcaatcataatattggcaaaaaccaacggcggtttcattttccgtcacgataaagtgatgtatccatgaaaagctgccgttgcgcccgtttatttcttgcagccaatttttggggttgtggtaccactttaagatatagcctttattcagccacgaggcaaacagctccatatcctcgtcggtaaacgcgcgtaaactcaagtttttcattaaatacctctccaatcaaataaaacatgagaaaaagcgtacaggattagaaattctgtacgcttttttcggtaaaaatcaaacaagatatttctgctcgcattcttccaatgggagcggacggctgaataaatacccctgcgcctgcgcgcagcccatgtccctgagtatgaggaactgctcctccgtttcaacgccttccgctattgtgcgaatccccatttttccgcagatttcaattaaaagcgcgacgaccgactgtgcttttaaatttgtcgtaatgtggtcaaccaggcttttatcgattttaagcacatcaaaatcgaccgaggtaaacagcgaaagattggcgtaatgcacgccgaaatcgtcaatggacacggtaaagcccgcatcgcgtatccgctggattaaaccgttgatgtcaaagccttcaaggccttccacgctttctgtcatttcaatttctacccattttttctcaatcccgtatttctcacagatttctgtaatacaggggataaagctgcgttctgtcagcgaatagcgggagaaattgacagaaatcggcaccgtttttttccctttggaaatccaactggaaaccttggagcacgcaaactcaaacacataaaaatcgagcgcactgataagctttgcgtcctcaagcagcggcaggaactggtctggcgccaaaatcccgccgtccggcatcctatagcggacaagcgcctccatccctaccatctcgcggctgtcgaaggaaacctttggctgtaaatacaccgggaaacagccgccgttgagcttttcccgcaggacgccgggcacggtaaggcccaaaacgtcgtcgttgtaatggcggtaacggtttgatgcaaggtttttccggtaatactgttttttatcctcatacatcaccgcgtccgcgtcggaaatcagccgctggatgtcgaccgcgtcgtccgtccactcatagccgattgccgcctggcactgcgggtcgctgtcaaaacgctttttcagctcaataacgttttccataaaggcttctttgggcatattcctgcaaatcacaacaaactcgtccccgcctatccggtaaaaatcggactggccgaacacctccgtaataatcctggcacagtccaccagaatacggtcgccataaaaatggccgtaacggtcgttgatgtccttaaggccgttgatgtcaagatacacgatacctacggcctcttctttttctttgtattttccgatatcctggatataacggttgcggttgtaaaggccggtaagcatatcctggtagctcagcttcatcagctgctgttcggcctccgccctgcgtaatgtcgatattaagaaataacgcagtgtatggagcagggatgaaatgttttttattttttcactcggaggattatctacgccgatatacccaataagctggccgtccttttcaagcggcgccacaaccatactatgaatcccctgtacggaaagggcctggtattccgcagggttgatttccttaatcttctccatatcctcgataatgacgcattcgcttttttcaaagaaagggcgccatctgtcaatcagggtaatatccagcccctgcaggttttccttctgcggttctattccgtcggcacaccactcatatgtattgtccattttatcgccgcggatattaaagatatacgcgcgttccgcagacaggaagctcccgagcttttgaagcacaagcggaaagcttttcccgacgttcgccgattcggagaggaactttacacactccataaccatatgctccgcatcaagcgcgttctgaaggtcgatttgctcctgcttattgtttgtaatgtcgaacgcaatttccagccgtacgctcctgccctcccacttgaccagcttatccttaagcaggtaatggcggcccgcaattggattggtatactcccatgagtacgtcttatcaaaagccaggcttttatttgtacagaacgggcacggatgatccagcccctgcaaagccttatagcatttctggccgttaagctccgatataccgaacattttacggccttccttattcacaaataacagctcgtaggtatccaaatcggctacataaacaagctcggacatttcgtccatcagttcaaacatggttcctcctgccatgccggaaatctttgtaagcggcggttccggcggcgctagcaatctttatttgccgcagtttgggaaatacgcttttattataccataactcatttaaaatgcacgcattttattattgtgtttcttggtaaattactgcctagtgcgccggtacagccctttgccaatttgcaccagcgcaatacaggcaatccataccataaacccgagggaacagcgctgcacagcctgctcgtcagtcataaggcggatatccacgccgccgctcgtcccaaggataaaaaagaaatacagaaaggtcagcagcgcaacggcgttatggaaaagaaagggcagcgcccttttcgttaaaaaataccagacggctgccaaaaacagacttgccgctcccaccttttttctgaaaaaatccggcaattaaaatcccccgttctattgtttaaaagctttattcatagcgtgaacgcatttttctgccgatatacagcccatgggaaaatttatgctttatggcgcggccgctttttgtccacatgcatttttagtacgataaagcggaataaccggccgtttcaaggcgataataatggtaatcccaaaatacaaaggaggaaatcaaaatgtcgccaaaggaactgctttatattgaggacgcgcttggacatgaaaagcagatgaaaactgcctgcacggattttgcgggacagcttcaggaccccgagctcaaaaattttgtccaggagctatgcagcaagcatcaggaatgcttcaaccgtttttacggcctactgaaataaaattgagaaaagaggaatagaaaatggaagatcgtgtcattatggataatatcttatccgcgacaaagggcgcttgcgatttgatgatgcacggcgcaatcgagtcctcgaccgccgatgttcacagcgcttttacgcagagcttcaacgacgccctgtgcatgcagaatgaaatttattctaaaatgtcgcaaaagggctggtatcccacccagcaggcggaacagcagaaaatcgattccgtcaagcagaagttcagcggacaggcttaatttcaaaaattatataaattgaaaacgaatcccctggttatgcgccgggggattctgcttatactaattacaattttaaaaatcagggggtaattatcctggaggaatggacagatgaaatccaatgtgagctttacgatatacacggacaatatcaaggcagctggatgattggatttctgccagatagcaaccaatttgtttttatgcgaagcctggatgaagaaataaacagggacaatcagggaaacataaaaacaaattgactatgaggtgattttatggcagcttcacataaaggcgcgatatcgttcggccttgtgcatattcccgtcgccctgcatacggcgacgcaggacaacgacatccactttaaccagctttgccgcgaggacggcagccgtattaaatataaaagggtctgctcccactgcgggaaagaggtcgcgggcaaggacatcgtaaaaggctttgagtttgccccggggcaatatatcactatgagcgatgaggattttgaaaaggcaaagacgccgaaggacaaaacgatacaaattctgcattttgcggaattgtcaagcattcgccccatttattacgataagacctaccacgccgtgcctgaggctggcggagacaaagcctatgagcttctgcgccgcgccatgcacgacgagcaaaaggtggcgatagccaaaacagttatgggccagtctgaaaagctgctttgcctggtcccaacacaaaagggtattttggttgaaacgctctttttcgcggacgaggtgaaggaaataccgaaggagcccgcacatccggatttggcggaggcagaacttacaatggcaaaaacacttgtcaactcaatgacagcggaatttgaggcggaaaaatatcatgatgaataccaaatcaggctgcgccggataatcgaggacaaaatcgcgggaaaagaggtcgtacaggctcccgcggaaaagccggataacgttatcaatattatggaagcgttacaggccagcctgaagcaggtggaagaagataaagccccgcctgagaaaaagagcgcggaaacggcatgaccgatatatttgaaaaaaagcagttaagccctatgctgattggagaaaccgccgacgcctttgacgaccctggatatatatatgagatgaaatgggacggggagcgctgtattgcgtatctcgacccaaaagagggaaccgtcctcatcaataaaagggaggtccgcatgctgccgaaggttccggagctgtccaaaatgcacgagcaggtcaaaaaacgctgcatcctggatggcgagctcaccatgctcaaagacgggaaacccgactttgaaggaatccagcgcaggagcctgatgagcaacacctttaaaattgaaatagacgcaaagcgaaaccccgcaagctttgtcgcgttcgatattttgtactatgacggggacgacttgacgccgctgccgctgatgaagcgcaaggagtatttacaaaaggcagtaaaaaaagaatcagagcgcctggcgatatcccgttatatcgaaggaaaaggaactgccttttatgagcttgccaaatcccagaatttagaaggcatcgtcgcaaagcggaaagacagcgtctatgtaccgggaaaacggacaaaggactggttaaaaattaaaaacctgcaggacgacgactttgtcgtctgtggttatatttttaaagaagaccatatcgcaagccttgttttaggccaatatgaaaacggcaggctcctgtacaagggccacgtgacaatgggcgtgcgcggcgcggcatttgaaaaagtcaaacaggtaaaagctatttcagaatccccttttgacgggcctgtcccgtcaggccacggcaacgagaacgcagtatggcttgtaccggagcttgtttgtacagtaacctttatgtatcgtacagaaaacggcggcctgcggcaccctgtatttaaggggctgcgcggcgacaagctgcctgctgattgcacagagcaaaaaaaagcccccggggattgacccgggggctttttttatttattggcggtttcctcttccggctgcttttccccttccgaacaggcaagctggccaaataaatcctgtatatccaaaaaagcgtcggcaatttcaggccggaatgcctgcccgcgttccttcacaatcaactccacaacagaggtatgggaataggctcccttatagcaccgctttgaacgcagggcatcgtactggtcggccagcgatacaatctgtgcggtaactggtatttcattgccagacagccgatacggatacccgtttccatcccaccgctcatggtggcaaagggtaatttcgcgtaccagcgacagcgccgtatcatggcattccagcacatcttcgcaccgggcaatcaattccgcgccctttatcgtgtggagcttgacgatagcatattcttcgtcggtcagacgcccctttttattcaggatagctttgggtatgaagcattttcctatatcatggagtaaggtagcatgcttaatttttaaaatatccggttgctttatttcctgaaaaccgcgccgtacaagttcagttaacagcaattcagtgtagagcgcaacccttttggcgtgaccgtctaaaacgtccgtaacgtccgtttgtaaatcgataacatgattgcagcgcatccctttcaccttcccctccgttattaccggcggccgagctgtttcgtttgctcatccagctttgccccgagatagtcgcccagctgcttttctgatttgagctgacgcttcagttcagcgttttccttttgaagccttgcgttttccatccgaagttttaatagctgtgcatcctcatttttctgattcatagaaaaattctccctcactttgcctggtcctgcaacgaaacttccggtcaaaatacaaatcaaaaatttcaatctggcacttttcaaagcattccattacatcctggccaaacaaatcggcgccgttcttctgcataaatctggccgtctttaaaatattccgggccaggttcccccctctgccggtgagcatttcatccagcctgcttgcaaaaccaaccagccgggccgcaagcgggatttgatttccaaagagccctttcggatagccggaaccgtccatgcactcacaatgatacctggcaatttccaaaacaatgccgcggtctaagcagccgtcgtctttcagcttccttttcaaaagatattcggttgcgattggtatctgcgtcttatcttttatcgtaatcatacattcaccgagatggtggtaaaatccgccctgccaaactgaacgggaaaaaaccgaccgctccacatccttcggcaggttttttgccgtccctgacagaatatatgccacaaccgcagtatgcgccgagtgggaataaaccttctttggaaggctttccataataatcgtcagaggacttgtaattgtaggggattgccgtacgttaaccaaatcaaattcttcctcgcttaatatagaaatcatgtctttcgcattcgcctgcgccataaatcgcactcctttgaggtttgttcgtcgcaaaaaagcatacaaaaacaaaagcggcgcgaaaacccagctatggtattttcagcgccgcataaaaattacgttataatccgtgttaaactagaggcaacaggcttccgggcggcgccgtgcttacgcggctaacgcagaaaacaccgccgggaagtccgattaaaaatgtgaaaccacacgattgcgtctggcaagcctgcgggaaagatttcccagactatttaagcctgcgctgcttcggacgcaagcgccgcgccgcaatcagggccgccaggcttaggagcatgcacagcatccacggccagacgctcctgttatcccccgtctggtaaccgccggacccatccggattatcagagttcccggaccctccgccggaatttccgtgcccgttatgagggccgtcggggtcattggggtcataggtattgattaggtcatagccgtccaccgtcttctgatagcccggcaccttttcctcatctatggtataaacaatttcctttccgtcgccgtcatatttgggtagacggaaaatataagtccagtggtccgatgcggttaccgtgcgctgtgccacgacgacaccgcccacctttacatagacaaggatggattccggataattttcgatttgattgccgccgtgcacccatgtttttgtaccggcaatttcgattttttcgggagaaggcggcggggcggtatagctgttgcggaatatcgccttatccgcggcctttccgtttttggtaagcgccctcgacactttcaatacgccgtctttttcagtaaccttcactgtataggtgtaaacagaggaatcgtaggtccagccgttttcgcccgtgttctgttcgatgatgctgtaggtgtaaacgccgggctttgtatagctgattttaccgaagcccgctttgccagcgccggtaatggttatggcctttctcccgtttaccgagccctccggcataggggcgttattcattgccgtcatgataaaccggaacggtactttcggcgctttttctcctttgatggttttcacgacctccacactgtcggccgcgaccggcgggacataaacgttcctgacgtccataccgttataaaccgggcggaaatgttcgaccggagcttcttctatggtgtattggatttcggtcaggccgtccggctcatacttgggcgcgttgaacgcataaacccatttgccgtttcggtcgggctttactacggcggtatctaccacagtgtctccgtttttgaggtaaatcgtaatagattcgggcagcttttgctgacttccttgtaaatcccaggttttttcgccttcgataggaaccgtaaccgtgccggtaaatttgttcgtaaatttggctgtattgggtccaaggttcaggacgccatcgccgccggtaacgccggtcaatacgtagccgtttggtatatcggcttcataaacggtgtactttacgcccgcgggaaggtctttaaattcaatggattcccccgccctcaattcaaagcgttcaggctggcggccctccacctccaggacaaactggaagccgcgtcccgcctcaccggccgggacttcccctacgacttctttctggacggtcaggctggcatttccgctttggccgttttcataagtgttggtaaacaagacgaaagagccttcctgtgtaatctgcccctgatggttctccgacccggcggtatagccgggatattccgcctcctgtaccttgtactgtacccccacggggatattttcaaacacagcggtttgcccgtgctttaatttgattgtgccgccgcttacgaccgtttgcggggcgccttcgccgattttgcaggtgtaggcgcctccgtcggaaaatgtgacggtaaatatgaattccagcgccaattgctcatcggtaagcggcgtaccgccggcgtttacgacgagctttttgattgtaagcgggccttccaggcggcggttgtacgcggtaaccgacaccctgttgttttcctccatgccggtaatctcaaaatcatagcgggtgacgggagcgccgttttcgtcccggtcgtagatatatccgtaaccggggtttgtctccaaaaagtaatatgttccttttgtaaggccctgcacccgtatttggccgttctggtcggtgacataacgcccgccgacctgtacgtcggggctgcccgctttgtacaggtaaaactccgcgccggggacaatttttccggtttccacgccgtcgggcgtcttttccagcttttgcaggataactcgcgcgatgaccggcatgccggacgcatcgttggttttgtggctgcggtagccgttccacgcgtatgtacctgcgacaaacgccgagaggacgaaccccatggccaaaacaacgcttactatccgataggtatattttttgattctgctggtcataggtttcctctcccttccgccggtttaaaaaatgtgtaaaaatcagagcaggcttgccgtccatctccggcttgcccggcggtgacagcctgctgaagcgtgcctgtcaccggggcgggggttccgccccggcaaccataagcgccgcgctcaaaatccttaaattccatcttgaagaatagcggcagtcaatcaaatacttcggccctgacccacatggcgggacggacattgttcaaattagtcacaaggtggttacccacatggttatcgaagtataagcctgatgcgtacgaagccttcataccgggggaacggagccagctagtaacagaagcaccgtctccactcgctcccagagtctgccaattgctggccgcatactggcacatgccgtttgtatgataaacagatgcgtcactccactgtacagccatatacttcgcactctcttggaaagacagcgcaaacgggtacgcgtaaccggtagtggcgcttggcttactgatgccggcggtaagatttccaaacgaacccagaaccgtgtcggcgttacttctcaccgcaaaggacttcaagccctccagcgtgccggtggacgtccccgaattcgtaccggtattgatattgtcgtaccaaagctcaatggcgttcttgacgttagaggttgcgtaattgtaattgccggaggccataaatttcatagtaccgacgggcaggctgttcaggcggacgataaggtaataaccgtcggtttccgcaatcgccatccagtcggagtcgtcgttgagcttggaacccgggatgatgtgggtggcgccgtccacgctgttgtcaggctttacgttgaacgtccatacggcgtatttggtgttgtcataaacagaggttgcgcgtactgtaagggttgtggcggtttccgccgcgccgattgtgagcacgccgttttggtcgatgctgctgtgcgtgccattgtatcccagcaggctccaggtaacggccttgttcacgccaaccgtgccctgtaccttcgcgctgaagttaaaggtcgtaccgcgcatgatttccgtgggcttttcactaatcatgacattactgaccttgaggaccgacctgcgcagggcatcgacaatccggtcgttgccgctcatgtcgttttcctcttcccagcgggtcagctcctcatagcttaccgcctgcatgtccgcgtgcagggcgtaatacgtcttatcgtcggacggcgctgccagcaccaagctttccaaaaggttgccggtctgctcgccgggggcgagataatagccccaccatacccagccgttgctgttgccggtatcgcggtcgtcgataatccattttttgaccggattgccgtcccaattgctgagcagtatcacattttcgccgaacacccattctatataatcaaagtagctggggtttccggggccgtttacgtcccactggttcataccgtctatccatttatgaaccgtgtattcgcattcgccgtttaattgcgggatagtatagcctacgtccacggcggagtcgataagctcgtcatgcaaaccgtcgggagatttcttctggtcctcgtccgcccttttcgggattgccatttgcaggaaatcagccacgccgtcctcgtcctcgtcgataagcatattacgcgggtttgcgttatcgacctgcgcgtcaatcagtataaaattaccgtaaacgccgttggggtcgtcctccttggtttggatgtaccaggggagctcgtcgtcgtcaaggccgtttaccgcgtctatcatacccgccggcaggtatttgctgtcggcggaaagggtctctcccgcgccgtcgaccgtgatgtcaggcaagagaaggttcgtgttgttaaaagcattgtaatggcggagccaggcgtcgattgaatcgcggttggcggcgaccgacgcggtacgcagcggcgtgaaataaacgcgctggcgccttacctgatggaggccgttgtcggcttttttcccaatgatgcgggcgtattccctcgccgcatcctcgccgcccgcgaagatggtaccgcccaccggagcgtcggtttcaaccgccaccggccagccggtttcttcgtcggctgtaatttgatagtttctgccgggatagaactttatgaactgcccgtccgtatcaatcatatagcggtcgggcgtaaactcctcgttcatcggataaaattccatgaattccttgagctggatacgggcaaaaatatccccgtattccttgttatccccgtccgcttccccgctgccggggtttaatacgctgatttttttggtaagctcggggtcgtcggttttccagtcgcgcgccttggcgttgtcgtattcctctaccaggaccgccttgtaatgcaggccgccgatgttcgcgtcgttcgttttatgctggcggtagttgttccaggcaaaggtaccgccgagcagcgccaaaatcagaaccattgccacagcagcggtaactcttttgcgccgttttttgctgtttgtgtccgtcatcctttaactctccttttgctttggtatatggaaaccaggcagaagcctaaccatgattcgcggcgttcatgccgttcccggggcggtgtccctgccccgggtaatagaaagtgttcgtgtgaaccttatttattgaaggatgtaaaaagttaatcaaaaatttctgccctgacccacatggcgggatggactgtgcaattcgcagtattcacagggatactgtgcgccccgccactttggtcccaatctgaggcgtttcccgcaacccggccaggagaccgaagccaaatataatctaaaacgccgctgcccatactttcaaatgcctgccagttactgtctgcgtactcatacatgccagttgtttgccaagcacttccgttataccactgagtactcatatacttcacagcttcctggaaggataacgggaacggatacgcataaccattgacagcgtccggcttactgatggcggcagtaatattcccatgtgaaccgaggacggtatcggcatcactccttaccgcaaaggactttaagccctccagcgtgccggtggacgctcccgcatttgtgccggtattgatattgtcgtaccaaagctcgatagcgttcttgacgttagaggttgcgtaattgtaattgccggagctcatataatttatagccccgataggcaggctgttcaggcggacgataaggtaatagttaccatcctgcgcaattgccatccagtcggagtcgtcgttgagcttggagcccgggatgatgtgggtagcgccgtctatgctgttgtcaggctttacgttgaacgtccatacggcgtatttggtgttgtcataaaccgaggttgcgcgtacggtcagggttgtttcggtttccgccgcgccgattgtgagcacgccgttctggtcgatgctgctgcgcgtgccgttataaccgactaaactccaggtaacggccttgttcacgccgaccgtgccctgtaccttcgcgctgaagtcaaaggccgtaccgcgtatgatttccgcgggcttttcattaatcatgacattactgaccttgagcaccgacctgcgcagggcgtcgacaatctggtcgttgccgcttgcgtcgttttcctcttcccagcgggtcagctcctcatagcttaccgcctgcatgtccgcgtgcagggcgtaatacgttttgtcatcggacggcgctaccagcaccaggctttctagaagattgccggtctgctcgccgggggcgagataatagccccaccatacccagccgtcgttgttgccagcgtcgcggtcgtcgataatccattttttgaccggattgccgtcccagtcgctgagcagtatcacgttttcaccgaacacccattctatgtagtcaaaatagctggggttattcgggccgtttacgtcccactggttcataccgtctacccaccgatggggggtatattcgcattcgccgtttaattgcgggatggtatagcctacgtccacggcggagtcgataagctcgtcatgcaaaccgtcgggagatttcttctggtcctcgtccgccctttccgggattggagtacccaggaaatcggcgactccgtcttcgtcctcatcgataagcatattgcgcgggtttgcgttgtctacctgcgcgtcaagcagtataaaattgccgtaaacgccgttggggtcgtcctccttggtttggatgtaccagggcagctcgtcgtcgtcaaggccgtttaccgcgtctaccatgccagccggcaggtacttactgtcaatgttgagctccgtacccgctccgccgaccgtgatatcggcgatggtaaggcttgtaccgtggatactgttgtaacgggaaaggaaggcgtaaatagaagtgctgttggcagcgaccgacgcggtacgcagcggcgtgaaataaacgcgctgcctttcaactacatggaggccgttgtctgctttctttccgaggatgcgggcgtattcccttgccgcgtcctcgccgcccgcgaagacgttcccgcctattgccgcgtcggttacagccgccaccggccagccggtttcttcatcggctgtaatttgatagtttctgccgggatagaactttatgaactgcccgtccgtatcaatcatatagcggtcaggcgtaaattcctcgttcatcggatagaattccatgaattccttgagctggatacgggcaaaaatatccccgtactccttgccgtccccgtccgcttccccgctgccggggtttaatacgctgattttttttgcaagctcggggtcgtcggttttccagtcgcgcgccttggcgttgtcatattcctctaccaggaccgccttgtaatgcaggccgccgatgttcgcgtcattcgttttatgctggcggtagttgttccaagcgaaggtcccgccgagcagcgccaaaatcagcaccattgccacagcggcggtaactcttttgcgccgttttttgctgtctgtgttcgtcatccctttaactctccttttgctttgatatatatgaaaatcaggcagaagcctaaccatgattcgctgtgttcatgccgcacccggggcggggtaccgccccgggtaatagaaagtgttcgtgtggaccttattcattgaaggatgtaaaaaggtcaatcaaaaatttctgccctgacccatatggcggggcgtactgcgccgcttcttgccgacacttcctcgtcaattacatcgccaaacgcggttacgtacgaggcacgggaggcagtcgaaccaggggaacgaagccaattaacagatatgtcgccgccattttgcattctggttgtccaattgctgtctgcgtactggctgctgaccggtgttaaatcggagtctccgctgtcccactgcgttgccataaataacgctgattcctggaaggacagcacgaacgggtactcgtaaccggtggtggcgtttggcttactaataggagcggtaacatttccatactggcctaccgtgacgtcggcgtcgctccttaccgcaaaggattttaagccagccagggttccggtagttgtaccgttgtaccaggtttcaatcttgctttttatatttgaggttgcgtaatcgtaatcgccggaggacatatatggtgatgacggaatatcgttacgcagcgcattcacacggacgataaggtaatagccgccggtctgcgcaatcgccatccagtcggagctgtcgtcgagcttgtcccgcgggatgatatgggctgcgccgtccacgctgttgtcctcggtctcgtcctcggtctgctttacattgaacgtccatacggcgtacttggtgttgtcataaaccgaggctgcgcgtacggtcagggttgtttcggtttccgccgcgccgatggtgagcacgccgttttggtctatgctgctgagcgtgccgctgtaccccggcagactccaggtaacggccttatttataccgacagacccctgtactgttgcgctgaagttaaaggccgttccgcgcacgattcccgtgggcttttcattaattataactttactgaccctgatgaccgattcacgcagggcatcgacaatctggtcgttgccgcttgtgtcgttttcttcttcccagcgggccagctcttcatagcttaccgcctgcatgtccgcgtgcagggcgtaatacgttttgtcgtcggagggcgctgccagcaccaggctttccagaaggttgccggtctgctcgccgggggcgagataatagccccaccatacccagccgtcgttgttgccggcgtcgcggtcgtcgataatccattttttgaccggcttgccgtcccagtcgctgagcagtatcacgttttcgccgaacacccattctatgtagtcaaaatagctggggtttccggggccgtttacgtcccaccggttcataccgtctacccaccggtggggggtatattcgcattcgccgttaatctgttccattgtatagcctacgtccacggcggagtcgataagctcgtcatgcaggccgtcgggagattttttctggtccccgtccgccctttccgggattgccatttgcaggaaatcggcgacgccgtcctcgtcctcgtcgataagcatattgcgcgggtttgcgttgtctacctgagcatcgaggagtataaagttgccgtaaacgccgttggggtcgtcctccttggtttggatgtaccagggcagctcgccgtcgtcaaggccgtttaccgcgtctaccatgccagccggcaggtacttactgtcgatgttcagctccgtacccgctccgccgactgtgacgtcggcgatggtaaggcttgtaccgtggatattgttgtaacgggaaaggaacgtgttaatagaatcgcggttggcggcggccgaagtggtacgcagcggtgtaaaataaacgcgctgcctttcaactacatggacgccgttgtcggctttctttccgaggatgcgggcgtattcccttgccgcgtcctcgccgcccgcgaagacggtaccgcctattgccgcgtcggttacagccgccaccggccagccggtttcttcgtcggttgtaatttgatagtttttgttaggatagaactttatgaactgcccgtccgtatcaatcatataacggtcgggcgtaaattcctcattcatcgggtagaattccatgaattccttgagctggatacgggcaaaaatatccccgtattccttgttgtccccgttcgcttccccgttaccggggtttaatacgctgatttttttggtaagctcggggtcgtcagttttccagtcgcgtgccttggcgttgtcatattcctctatcaggaccgccttgtaatgcaggccgccgatgttcgcgtcattcgttttatgctggcggtagttgttccaggcgaaggtcccgccgagcagtgccagaatcagcaccattgccacagcggcggtaactcttttgcgccgctttttgctgtctgtgtccgtcatcctttttaaacccctttattcagatagattccatgcgatggagcggtcgtcctgccgtaccggggcgggggtccgccccggatacaggcaatacgcgtgggtacttatttattggaagaaggaaaggaggtcaatcaaaaacctcggctctcacccacatagcgggacggacagacccttgatttgcactcgccagatagttacctatgtctccgctagaattcataatcgccgcgtctgtcgaactcctgccttgggaacgcagataactatgagcggttccaccgtcaccttcgtccttgagggcattccaattgctgttggcatactggcacatgccggttgtttgataactacttccgttactccactgtacagccatatattttgcttcctcctggaaagagagcgcaaacgggtacgcgtaaccggtggtagcgtccggcttgctgattggagcagtagtatttgcatactggcctacaacggtatcagcatcgctctttacggcaaaggactttaagccctccagcgtgccggtggaggcccctgtattcggcccggtattgatattgtcgtaccaaagctcaatagcgctcctgacgttagaggttgcgtaattgtaattgcccgaagccatatattttacagtaccaacaggcagggtattcaggcggacgataaggtaatagccgtcggtctctgcaatcgccatccagtctgaatcgtcgtcgagcttggcacccgggatgatgtgggcggcgccgtccacactgttgtccggctttacgttaaatgtccatattgcgttcttggtgttgtcataaaccgaggttgcgcgcacggtcagtgttgtttcggtttccgccacgccgacggtcagtacgccgttttggtcgatgctgctgtgcgtgccgctgtagcccagcaggctccaggcaacggccttgttcacgccagcggagccctgtaccttcgcgctgaagttaaaggttgtaccgcgcataatttccgtgggcttttcattaatcgtaaccgcgctgaccttcatttttgaccggcgcagtgcgtcgacaatccggtcgttgccgctcatgtcgttttcttcttcccagcgggtcagctcctcgtagcttaccgcctgcatgtccgcgtggatggcgtaatacattttatcgtcggagggttctatcagcgaaagcccctcgaggaaattaccggtctgctcgccgggggcgatataatagccccaccatacccagccgttgctgttgccggtatcgcggtcgtcgataatccactttttgaccggcttgccgtcccagtcgctcaataatattacgtcatcgccaaacgcccattctatataatcaaaatagctggggttgccgcggccgtttacatcccacttgttcttgccgtctacccacttgtgaaccgtgtattcgcattcgccgtttatttgctccgctgtatagcctacgtccacggcggaaccaatcggctcgtcatgcaggccgtccggggattttttctggtcctcgtccgctcttttcgggattgccatttgcagaaaatcagccacgccgtcctcgtcctcgtcaatgagcatattgcgtgggtttgcgttatcgacctgggcgtcgagcagtacaaaattgccgtaaacaccgttggggtcgttttctttggtctggattaaccaggggagctcgtcgtcgtcaagccctgtccgcgggtttactatgcccgccggaaggtactggctgttgacgtttagctccgtgccttcgccgccgaccgtaatgtcgggcaagagaatatttgtgttgttaacggcattgtaatggcgcagccacatatcaatcgaatcgcggttagcggccaccgacgtggtgcgaagcggcgtaaaataaatacgctggcgccttacctgatggaggccgttgtctgcttttatgctgaggatacgggcgtattccgtggccgcgtcccttccgcccgcaaaaatggtaccgcccgcgggggcgtcggtttcaaccactaccggccagccggtttcttcatcggctgtaatctcgtagtttttgctggggaaaaattttatgaactgcccgtccgtgccgagcatgtagcggtcagatgtgtattgctgaaccatcgggtagaattccataaattccctgagctggatacgggtgaaaatatcgccgtaaattttatcgtcgccctctgtttctgtattcccgggattcagcacgctgattttctttataaggtcggggttttcagcgtcccagtcctgcgctttggtgcggtcgtattcctctacgagcgtcgccttgtaattaagctctttggtagaggcgtcgttcgttttatgctggttgtaattattccaggcaaaggtcccgccgagcagcgccaaaatcagaaccatagctacggcggcggtaacccttttgcgccgttttttgctgtctgtgttcgtcatccttttaactctccttttgctttgatatataaaaatcaggcagaagcctgagtattattcgcggctttcatgccgcgcccggggcgggaataccgccccgggtacaggcaacgcgcgggtacttattaattgaaatatagataggaggtcaatcaaagatttctgccttcacccacatggcgggatgtatataattgggggcagtcacaggagagcgccccagttggcccttcacatggtgcagccaggccccatctgaagcgaccataccaacagaacgaagccaggtggcgttctccgaactaacgctaccctcgaaaacattccaattgctgtttgcatactggcccatgccggcttttgaaaagccagttccgttatgccattccacacacatgtacttcgcaccttcctggtaagacagcgcaaacggataggcgtaacctgtagtagcgttcggcttgctgattggagcagtgacgtttccatactggcctacagcgacgtcggcatcgctcctcaccgcaaaggattttaagccctccagcgtgccggtagagactcccgtattcgtacctgtattgacattgtcgtaccaaagctcaatggcattcctgacgttagaggatgtgtaattataattgccggaggccatgtacggtacagcgccgacgggcaggctgttcaggcggacgataaggtaatagttgccctcctgtccaatcgccatccagtcggagtcgtcgtcgagcttatcgcccgggatgatgtgggttgcgccgtccacactgttgtccggccttacgttaaacgtccatattgcatacttggtgtcgtcataaacagaggttgcgcagacggtcagggttgtggcggtttccgccgcaccaatggtcagcacgccgttctggtcgatgctgctgagtgtgccgctgtagcccagcaggctccaggcaacggccttgttcacgccgacagagccctgtaccttcgcgctgaagtcgtaggtcgtcccgcgcaagatttccacgggcttttcattaatcgcaaccgcgcttatcttcatttttgaccggcgcagggcctcgacaatctggtcgttgccgcttgcgtcgttttcttcttcccagcgggtcagctcttcatagcttaccgcctgcatgtccgcgtggatggcgtaatacattttatcgtcggagggttctatcagcgacagtccatcgagaaaattaccggtctgctcgccgggggcgatataatagccccaccatacccagccgtcgttgttgccggtatcgcggtcatcgataatccattttttgaccggcttgccgtcccagtcgctgagcattatcacgttttcgccaaacacccattctatgtaatcgaaatagctggggttgccggggccgtttacatcccactgcagcctgccgtctacccaccggtgggggatatattcgcattcgccgtttatctgctccattgtatagccgatgtccacggcggaatcgataagctcgtcatgcaaaccgtcgggagatttcttctggtcctcgtccgcccttttcgggattgtcatttgcagaaaatcggcaacgccatcctcgtcctcgtcgataagcatattgcgcgggtttgcgttgtcgacctgggcgtcaaggagtataaagttgccgtaaacgccgttggggtcgttttccttcgtctggatgtaccagggaagctcgtcgtcgtcaaggccgtttacttcgtctactatgcccgacggaagatactggctgttgacgttgagctccgtacccgccctgtcgaccgtaatgtcgggcaagagaaggtttgtgttattgacggtattgtaacgccggagccacgcgtcgatagagtcacggttagcggctaccgacgtagttttgaacgccgtaaaataaacgcgctgcgcggcgacggtgtgcgcgccgttgtctgcttttatgctgaggatacgggcgtattccctagccgcgtcctccccgcccgcgaagatggtgccgcccgccggagcgtcggtttcaaccaccaccggccagccggtttcctcatcggctgtaatttcgtagtttatatcagggtagaaggtgataaagcgcccgttcgtgtctatcatatagcggtcgggcgtgtattcctgtatcatcgggtagaattccatgaattccttgagctggatgcgggcgaaaatatcgccgtaggtcttattgtcacttttcgactctgtgttcccggggtttaagacgctgattttcttaataagctccgggttatcagggctccagttctgcgcctttacacggtcgtattcctctaccagcaccgctttgtaattaagctcctcggtagtggcgtcgtttgttttatgctggcggtagttgttccaggcgaaggtcccgccgagcagcgccaaaatcagaaccatagccacggcggcggtaactcttttgcgccgttttttgctgtctgtgttcgtcatccttgtaactctccttttcacgtgttgatatagtaaggttcagcggataaccgcctggccttttaagcaatgattataaaatggcgacggcaatttccgctgtggccgcctctccggatatcccattttgaaccgactgcgcaaccaccctgatggcggaagcggtttcatttgctcccacggtcaacacaccgtgttcattgataacggtaccggcggaggtgtttccttccacacgccaggttaccttttgcgtaatgttcgtgccggtgaccttcgcgctgaactgctgtacggcgcccttgggcagcgcaacgggctgggcgggcgacgtaatgcttatgcctgatacaacaggcttcaccgccacattcagcttgatgcttgcagttttttcggggtcaatcctggaggccgcggtgacggtcagggaagacgccgtttcattggtaccgacggtcagaaggcccgtatcgctgataaacgaaccgccgccgctgcctgtaaggctccactgaacatcctgcgggatgccgaccgagccgatgaccgcagcgcggaattgctgtgtgtggccgaaatacacctcggtcagattttcggggctcagggtaacggctgtgaccttcatgccggccttttgcagcgctgtgacaatctcgttgttgccggaagcatcccccggcgtcatccaacggccaagctcgttataggaaacggcctgcatgtccacatgaatggcataataaaaggcatcgtcaggctgcgcaaccagctgaatctgctccagaaaattcgaggtggattcctcaggctttaaatacatgccccaatagacccagccctcggtgtttgccgcggagtcatccacaatccattttttgactggctggccatcccattggcttaacaggatgacatcgctgccgtatatccactggacgtaatcaaagaagctttcgcccgttatgcccaccggggacggctgccatttgtataacccatcctgccactggtgcggcgtgtagaggcattctccgttgccggtctgcgtgctgccgaccgtatccgcggtattgatatcgtcctgatgcctgcccgtttggtcggacttggcgtttataacgccggtgaccagggaacggctgcctgctgtgcggtcaacgatttgattggtcacaataaagtcgccgtaaacaccgttggggtcgccctgctgcgtacggatgtaaaagggaaggtcgttgtccctcacgccgtcctccacgccgtctgcgggatattcgtcgatatgcttgggcgtatcatacatgcggacctgttcaatcacatgggggcttcccccatatttgttctcgagaatagaggcgtacgccgctgccgcgtcccgtccagaaagcgtaccgccgcccacagtgaccactgggtcgccgctgccgtctggcgcgactgtataacgtacattcgggtcaaagctgataaagttcccgtccgcatcggccatgtagcggtaagcgctgtattcctgcgtaaccggatacagctccataaattccttaaactggagacggatatagacgtctccatatacccgcgtatcattcggcgtttccttcccgggatttttaacgcgaacctgtttttcaattgccgggtccgaaattttccagttttccgctttggcggggtcatatttttccacaaggcgggctttgtaaaaggtcgcgccggcgttggcgtcgttcgttttgtgctggcggtaattattccaagcgtatgtactgcccagcactgccgccaataccataataccgacggcggccgccgctaaaacacggcggtttctgccctttgcgttcatatttttcctcctatcctatatgttcatttttctgaaattgggatttcaaaaccatagaaacccatctatatgacagagcgctgcgcgaatacggtaaacgtttaccatcacgccccgctcccaaattgttattttatgaaaaattatttattttttcgacatattttgataaatttcgacatcgcagatataaaatcacccaacgccgcccctcctaacgcgttgagttgcacacttttgaaaaagacatacccgctatttcaagaagaagcggaggctttcaaactctatctatattttatggtgccttgaaaaaacctgcttttgtattgtgcaacgcatgaaaatcacaacctgctgtgtttttcatgcgttactaaaaatatacgccctcttgaaggaacaacgctgtgcgttacccttccgattgcttctcactctgctctttggctttggattcgcccggatgcttcttgccggacgcaataaacacacgcaaagctacgataaaaccaatgaccagcacgaccatcgccccgacaaaaagaaggtttgatttcacatagctgaaggcttggccaaggaacaggttgtgccataccactttgcctactacattgtcggcccaaactacgccgtcgtcggccatgccattctcaattcccatggtcacaaaggcccgtacgccgctctggtcgtaattttcatggatgccgacgattttatgggtaacagtcgtgccgtccttctgcataaaggtgatgttatcgtcaagctttagcatattggggtcaacctgctgggtaacaataagggagccttggggcagctcgctctgcatagagctggtcagcaccgtagagaaagtgtatccgaagactgagcggggcgcgttcccgctccctgccgtagcggaatacacaatcacgatgacagcaaccagcgccgcataaaacaggcattcaaaaatgaccgaacgaacacggctttttttcttagacagtttgttttcctcgccctgcagttccatggcgggtgttttcgcagcgtccgaggaatccggttgaagcggctcagcggcgtttatgccagagcccagcgcttggctggccggaatactaggcctgtctgtttccataaagaatatagcctcctttgtaaaacagctgaaaaactactattctaaacgaacgttttggaaaccggggctttctaaaggactatacccggcgcaaacccgcaatgtatgtgtttttctcactgtctgtatgatagcacttgaatttcgttttgtgttatggatttgtatgaacggtagccgtattgtgacgaactacggtgtgtcttgtttttcagagtcgttttcggtcgttttttgctcaggttcggagggatttgccgctgccctgcgccgggtaataatcccacccagcccgtcgtattgttcggttttacgcttcgcgtaaattttcaggacaatatatgcggcaaccagcgccgctgtaatgcctatgctaatccaattcatcaacgtcatgttatttccctcctagccacgaaattttttagaggcaagatgctgcttccaaagcttattgacgcgccggattgccgccaggctgggatacagggtaacagcgccaataataatcagcagggcgtcaaccccagccagggccatatccaaagcgttaaacaatggttccggctgctcaggctgttccggctgcgcaagtgaggggatttccctctgctcgctctgtccgcagtttttgcagatacgggtttccacgccggtttccccctctttcgcagggaccttcactgtccattcatcaaaatcatggccaacagccggaataggctccgtatagttgtgagacttatcatgggaacaggtataggtttttattccatttccggtacaggtagcctctttcgttatcttttccgcgtagtcgtgcccaagcgccgccgcccccggttcggtatagctgtctccgcagcgggagcaagcatatgttttcacaccatccgtgtcacacccgggcggtgtttcggtcagtttaaagtcatgacccaaagcgggaatgatttgtgtttcgtcatgcggcttgtgtgcgctgcaggtacggtgccgttgtcccggttcggtacaggaaggagccttgtcctccacccattcgccccaggtatgccctgtcgccggaagcaccgcctcatattcctgaccgcataattcacagcggaacacatccgagccatccgtttgttcagttgctggcgtgtgtgagacaatcgaatatttatgctgacccgccgtacagttatacgtttgctccgcattgacaggaagaggactccacaacaggagaaaaaacagaagggacagggctaaaattgtccttttcatatgctttcctcctgactttccgaacgccgccagttttccagggcttccttaaaagcagcataataggttcgccctacgggcagcttcgtcccgtcggaaagctctgcttcggtatatgtaaggcggcggacatgatccagcgataccacatacaatcggtgtatccggcagaagcctcgttcagacagctggatttgtacctttttcagtgtagataagaattcaaaatattcctgattataatgtacacaaactaaatttttctgtacatcaaaatataaaatttccgatatggcaatttgccggtattccccgacacggttataaaggacatattcctcgcgaagctccataacggtatcgattgcccgatgaaagaccgattcaaaatggtcgggcacccgtttcaataaatatcccgacccttgggtttcaaatatctcttcaatccggtcaccgggatttttatgagccaagaaaataatctgtccgctatagccaatctgccgtagagtgaaagcagtctcgataccgtcgtattcgggtgcgtccgcctcaagaaataaaatgtccagatcttccctgagcttgggactgtctaaatcaaaaaaaaggtcgctgctgctttcatacagcctgattctcaggttaagagagcagctctgtccaagctctcggcaccgggaggcataatactcccggtctttccggcttctgtcacatattgcaatccggataattctcataatccacctcgattgttctttccataaaaagttattattatggttttgtctacatctatacgcttttataaatatcacaaggattttcagcgccttgtgtaaaaacatgcaaaatagcgcctgggcagccttacgtataaaaatcgacaaaatatagcactattatatagtgtttatcggtaagaaacaatttgtaaatactcccaaaatttcccgccaaatttttattcaaacaaatgaaagttacgccccctctcacagagcctgtaaaaaaacgcataaacctatatgataattatccagctcctaatacacggaaaatgcatagaaaacagcttatgagacagcaaaaggcccggttttcgataaaaatgttcgaaaaccaggccttattcattttgctcgggatggcaaaacctgaacccgcgtggggagcgacaatcgcgcccacgacagcacaggcggcgtaaatacaatttcaatccacgctcccgcgtggggagcgacggcaaaacgcataaaaaccactcatgcgattttgtaaaaatataacaaaatattatttaattacaagacaatggcccaactatatgaaagcaaaagaagaaaaatgagatatatggcattaaaatgaggtgcgaacctcccggcgaaactctgtgcacttgtacttcgcaccagcttttcactatataaaaagcggcttctccggctgataggcctccttacagccataatgttcaattttactttgatagtggttgccaagattataaaaccggaggctgtccttttccgggtcgatgattgcacacagctttgcctgcaagcttcggcgctgcgcggcgtccagcaggcactcgaacaccgagcactggacgcgctgcccatagttgacacactgctttgccacctgccgcagacgcttccggcctgcggcatcctccgtgttgacatcataggtgattaaaactaacaaaagatatcacttccataaaaaaggtgggtatccgtccaaatcgccccgcagataccttgccaacagcagagcctgaatgtacggcacgataccccattgtaatttttcattcaggtaggggtgggtcagcatctcctgctttttctcctgccaggcggtgagaaatgcgcgacgggccgaatcggtgagcaggaccgcaccgctctcccgggtttcaaagtcctcaggtttcaccatgcggttgttgatgagggtcagcacgaaccggtccgccatgcaggggcgcagctcctccatcaagtccagcgccaaggacgtccgcccagggcggtcccggtgaagaaagcccacgtaggcatccagccccacactttcaagcgcggaggcgcagtcatgcgccagcaggctataggcgaaggaaagcagggcgttgacgatgtccagcggagggcgccggtttcgtccatgaaagaaaaattcctctttttgattgagaatcatatcatccagcacgccgaaataaaccgcggaacccaccccctcaaagccccgcagttcttccagggatgtggcttgcgccacggtggggagcaaaccacgcagggtctcagaggcggctttcaacttgactgtgtccagtcgctgagcatgatcccggcagctccgttccacgctccatcgggcgttgtgaagcttgccgaaaatcattgaccgggctgcccggcagctctgttctgtgtcgtctgccacccggtactgggtccggcgaagcaggacgttcccgctgctcttgccgcagctccgcgccaaaaactgtccccggggcgtgcagaaggagaggctgatcccccgttgggcacaagctcccatcagagccggggacgcgccggagtaggaaaaactcacgatgccgaagagtgtgtgcatgggataacgggccaccacctcccggttccggttcgctaccacattttcgccgtccagagacaggtagacatcctctgaggtgacaaaaagcgtgttaagcagatatttcatttctcctcctccattgtcctatgcaggtagtcctgcacactttccgcccgcatcagccggggcaggcacagctctttcagggaacaggcattacaggcttttgtgggctttacctttggcgtgtggccgcgctgatagagctggtgcatctctgtcaaagccttttttacggtctgccgcagctcctctgtaaaagcaacaggcatccgccgccggctctccccgtagtagagggccccctccgggacaggccagcagagcatctcctccaggcacatggattgggcacacagctgcagcgtatccccggcacgctcgctgggctttccccgcttgtattccacgggatagggctgccacagaccctcgcggcctttcagagggatgcccttctctcccctgtggaattccagcacgtcgcactccccggacacccccagggtggacgagaacacgttcatgccacgggtgacaaggagatcgccccggctctcggaaaaccccttgtcatgggcgttttggtgcatcaaagccccatccgtggtgcggaaattttccgcccattggtgctcgatatggatgagcgcccattgccgtctgcagaatttaaagtgctggataccggaaagctgaagaaagtcctcctctttatattccatcgatgacatcgcagtgcaggccgggcagctcctccagctcgatgctgtagtcgtctgcgctggcaggtacggccacgccgggctttaaatccacgtggaggctgcggtggaccttggcggaagaatactggccggagggacagctgtgggtccaccagtagagcttgcacacctccatggagccctcaggacgggcggaggaggcatcgttctcaaagagggtgcgcagacactccttgacgatgtccgcgtccgcgtcgctgaacccggtcttctgagccagctgaacgttgatagaacccttaatctgatagaggccgaagcggacaaaatgcttggagcccatggtatcggaactgcgtttttcgctggtttcgccgttgacacttttggtaatttgcatcgtgcgcacctccacaggggatacgctgacggcctgatgaatggacacgggtccccgcacacctacggaaacaccgctcttctcagtagatttgaatgcgaaaacctgtccaaagctgcgtacatccagccacttctcacaggccaggcgggcatattcctccgcatccttagtcttttccatggcctttttggcccggtcgctgaggcttttgcagccgtcatcacagcggtcgctggactggacaaagatgctctgtcccaggtcctgcatccggttgcggattttgcgtttgatacacacgtcagaaatctcaccaaaaccgtcgtagtccgtgcgggggcggttgccgttcagggggtcgccgttggagtttgccatgctgacgctgaccagcgccacaaaatcaatcttattttttaaagtatccattttacatatcctccgtcacagttttcgtttcgttatcagcggcctctttttttctggtcagcgcgctgcgttggtggtagtagcccagcagataggtgtcgtccagctttttgtctaagttatggtccttcgggtccggcagcatgtctgtaatctctccgattatatttttgaagtacgcgcgcaggcccggcttctgccgggaaaaatagggattaatctgctcgctgataattcgccaggcgtacagcggccgctgggcgaataccgactgcatccgaatggcgttgggctcccggccctcatcccggtcgtaagtgctccgctccacctgctccgccaccgccagcaggcggccaaagagatagctgcggtctgtgtttgatgtatccaatgccaaaccaaattcctccttttttactcggtcgttgtgggccttgcgtatgagagcgcatgcggtgctcaaaaggctctccctgttgccggacgtgtaggccaggggctgtccggcacgggtggccagcccccggataatgtcctggggaacgggccgccggtcgatgatgcagggaagcatctgctgcacgtgttcccggagtacccggtcgtccaggtcgatgaactgcccctgctcggtgccaaaggcacaggtgacaatacgccgaagggagggggattgtacgccgtagcgggaatgccagcagcaggtggcgtaccaatcctcgatacggtctaaaaagtccgaccccctgagttcactataataggtaatcgacaggcgtccggtggtggcggcgtccagcgccgctacgatcacattggcttccggcttcatggcctgccggtagcccaaaagcgtagctaacagctcatttttataactgacaaaagtggggggattggagctgggcaatcctaaaaaagcaaagttggggacgggacagccctccgggttccagcaaaggaaagtgcgtccgcccaggacgaccccctgatttgcggcgacccaccgcagggcgctgtgtgccttttgagaggcggtatagcccgcgttggcggcctggcgcgcctcggtgaagcggccccggtaggtaaagccggacgcgtcgttggcagagatcagcttggcgccgaaggaggcggaaaccactcctttcggatgcatatcgcagacagtgtcctctacgcctgagatgaggcacaagtcctgcctgacctctgcgcggcaggccgcgtagtagcggataaaactgtcaaacagggaggcgtcctgccagcaggcggaggaggcgccctccggggcagggatgacccgccagcgcaccaaatatttgtcatacttcgcttccggcgcgccggtctgattgtccacggcgatcaggccggcgctgagcaggtcgcttacaatcgaccccttttgctcataggccagtacagcctgcaccttcgggtgggtaaagctggagccagaccacatacggagcttcttcatataatccgcgtatttctcctctccatagggcgcgaggtagataagctggtcacaaagggaatgggcgcatgctttaccggtccggttggccgattcaacggttactggtatgatggttttagagtcctccttggaaacctcacaggcactttggaaaattccatcattggaaagggtaatttccagctgggcattctgcagcatgtgggagacaggggtcaacgcctccttttggccagcctccaggacgcccgccctgcctgcctgtgcttcataggtacgataggccgcttgcagcaatcccacttacaccacctccgcttccgtcgcgtccacaccctgaaaattgcccgccgttttactaaagggcttcacgtccatcacccgggcggttcgagtcaccgggcagccctctgggcggaggaacgtgacaacgccccgtttcattacagggtaccagaagcgtaccgtcattttaccgcaggtctcgtcggagtaggcttcgtcggcgtaggtgatgccatggtaggtgaggccgaaggccagctccggagtgttgtcataggctccctctccctcgtcaaagacgcagggctccacatacccctggcactccctagtgccaagaaagatatcccgcctgccgccccgctcaatcatccgttttgcaatgttgtgatgcttgttttcgtttcggtcccccgccagctcgggccggttttcattccattcaaagtgggcccgcaccctatagcggcagtcctttaaataggtgtagtaggacaggtcgttgccgccgctgtacttgataggccggatgcccttgaccgccgtctggatgggattcatcacccgaacggcgtcgataatccagagaaaggtgggcttccagtagacagaggacaaaatccccttcaatgcctcataggtgggaatctgaagggtacatttctctccccccacccgggtaatcgggtcagaaaacagggcgtagccgccggtgacctcaaattccacggtatttttgtgttccatctcatacctccgataatgttataatgcctccctcgagaacaacacccaactccgaggagtaaaactgtggggcgagcgccagcaccaagccctcgcatagtgagtaaaccccgccgcgctcctccaattttttgagttggtatgaaaacagagagacggtaaaacgtttggctttttgcagcaattcctttcgcagcatcaaatcatacttggcttgctcggaacccaaatccacgataaggcccgccccgtcgccgtagggtaccaatacgtccgtactgttgtcgtcaaaaacgtgaaattgctcccccgcagtgcagaaggcctgtccaagcgtatactgtcccccggcaggacaatggggacgggccttggcattgacagagagcaggtcgaagagggtagtaccaatcggctccggcagcgggaaatcctgggcgcccttgggcatctcatcgtacaggctgtggtaataggcgctgatagcctccgcaccggccagatcgttcccaaacgcagccgggtccctctcaaagcgcagaagcaccgattgggcagccttctgagcctgatcgatttccctcaaatggcttaaattctccccctggagggtgaccacgtatacgggacagagccggccgtgctctccgccgcggttgcatcgtccagcggactggaccaggttgtccatccccgcacagacgcggatgacgcagccgaaggagaagtccaccccggcctccaccagctgtgtggaaacgcatagcacggggacattgccttccaacgcggcgttaatcttctccagggcacaaatgcggtgagccatgcacatggaggtggacaggtgaaagagctccccattccaacgggtcttgagcgcctgaaacaactcggctgcctcctgcttcttgttacagataagcagcaggctgcccgcctcgcccgcctgctttgcggcaaagtccgcgaggccctccactgtgaaggacggctttctacggtcgataatccgggtgcggcgaaacacctcccagagcttggggtcgtaaggcaccaggtccggcgacggtgcgtaccgcaagggatgggagacggcctccaggcagggctgtgtagcggagcacagcaccaccttggcaccgcagaagcccgtgaggaaattgactgccaaatcaaactctcccagcaggttccgggggactgactgaacctcgtcaatgacgatgatactatcagtgagggcgtgcatccgccggatgcacgaaggcttgcccagcagcagggtgttcaaaagctgaaccagggtggtgacaatcaccggagcgtcccatgtctccatcaacagctcgctgctttccagttccccgtccgtggggatatcctgtacaagattcgagtggtgctccaaaataaggccatcatcccccaaaaagtcccggataaccttggcgttctgttccaagacggacagcagggggatgacgaaaagtacccgccgcttacctcccgccgcagcggccagggcgtaacgcagtgtcgtcaaagtttttccgccgccggtggggacgttgagccgatagacgccgtcttccaaatccgctgcggagcggcagcagtcagagatcctccgccgggcctgctcgatgggcttgcttgcgggaagcgccagaagccgcgcctctacacgggagagcagcgcgcgccaattgggggcgggagccactgcaaaaaggccgccattcatgaactcggcggtgtcccgcctatccccctcgataacggctgagagtatctgccgggcgagcagcgcgagatggaataacagctcctcctgattttcagtcaaagatttcaaccgctccaaagcagccgtcacctcacaggccgccgactcgaagagcttgtccaactcctcatcaccggcgcagtggagcagaaaattttctttcgcctcgccgtaatggatacgcccgtcggtaaggcggtgaaggtatccgtccgtcccgtcgggagcgatgcagtcgaactgcccgtggtggctgcccacggcaaaggcgataatttcgcaggtcagccgccgaaaggggtcagcaccatggtgccagcgctccatcgccagccggacgccggcaaaggtgtggttcacactgccccggcgtaccggttctcctgcggcggcgcgggtgatgtagtctttgaaaacagcagtatactttccacaatcgtggagcagcccggccagaaatgccgtttgccccattccacggggtgcggccgcagcggcgtaggccgcacagtgcctgcaatgtgtctccaccgtctggacagtccgtcccatgacttccaatcggatatgtgccggaaaatccaaatatgtacctcccctcaaacaagcatgataaactaaaaaaggattttatatgtttaaaactattttaataaagcacggcaagatacgattaaatattgaaaattttttaagaaccgcccactctaatcaattgtttcagttataatctgactgcaggctggatttttctaaaaaattcgttggtatgtttactcgtccacgtgtggtgtatcaggcggcgcagtcacattactaacaatttttcagcgtaattgatgggttaagagggagagtatttgcgaaaccggaatttcgtaacactgggaagcggtgactgcgttgccgtaaaattcgtttatatctaatttttttctgttcctatagaaaccagccccaccaggttaacttgtatcgtcggaatcaagtggtcataatgtgtgtgggtaaactgataagcagcttttataagtgcttcttagaatataattccttagaaaaacacaacaacatatatttcttaaatttagaaaaattaataaaaaatttttacgttccacgacattatacaccaattttttatatatttcaacattaatattatatattttactgtttaacattttatataaaaatcctgcgaacgatgaccgtctcctcttctacaatcacatgcccgccgtctgagcctttttcataacctaaaaataataacggaagttgttgcggccttccttgaacccttttctcacgcctcatgcatgttccgtctgatggattcgctttcgtcctgtgcataggcgctgaaccaagtcaaaagtgtcttcccgatgctttccgccgtatcggttccctccttttcaaataagacggatacgccggcgctttcagcttatttcaattttttaaatatagatttttataggttatatcaaaaagagcggaaacggaatcatccgttcctgctctcaaatgtctcatttattcctaaaacaaatacttaatttgttttgcgtttttcttttgtacaggtaacatattacgagccctaagacgcataaacaagccaaactcaatttcgtttgttatctacattccgcacatataacctcatcgtttattttgttaatgtctataaaacaattaagaagcttttatcgtttcgatattcatttgacattttatatatatcgatttataattgtgtaaattaaatatatattaaaagggtgattccaatgttttatatactttagttcacatcgttcataaaaaggagtgtaagaaagtgcgtaaaataaaacagtataaaagaattactgccattgcccttactctgctgttactatgttcggtatttatcttaccgggtgcgagtgcagctgcagctgcgtcgggaacgtttattggtgagcagacagacatcagatatattcacggccaaagagttgagtccaaattaaccgtatattccgacacggcgacattgacaggatatgtccctatatctggtggcccgccaaatagtgcccatgtaaaaatgatagtaacagttatgacatcttacggtactgttaaacatgaaatctcagatgagcgcaccgttctaacaaccgcgacgtttaactctggagaccttaagattataagcgcggaaggatatgtgagtattggtggatatcctgacgaggtcatcagtttaagtgtcagttaactaagttgagagaactctacgttccggatgtttagctattagcttgaattaaaattattcccccgtgacggtctgaagtgttgcgggggagtattttcttagtcaaagttaacaaataacaaacataagaaatatttataactttcttatacaatatgtaaaactttgcaacaattaatataattctgttgacttttattgtctgataattataataaaagagtagcatcacctaagcgataggcggtttaataaagcccccgaaagggggcgatgcttatggagtacgtaatcgcattaataattatccttgtattaattgattgtattttgttgtaaaagaaataaccgccctgtcctgcgaaaacaagcggttatttcttagctaaatgtttttcgggggagaaccgcctatacggtggtgctacgcccttttctatctatattttactttagtaacgttttactgtcaacataaagagtataagaataacacataaaataacctgtaatattataactaaaattgcggcagctctccccctaataataagtttcatggccctatccgtagcattgaacgtattaagctgctcagggaaaatgattggcatacgattataaaccttcctgacaaattcatttccgcatgctgttagtatgacataacgccgttcactttgataggcgttaaattccacatagcattaggcaaggttaaaaaggaacttttggtgcgccttgtcctgcgaatactcaaagaatcccatgaatactagattcatgggattattcaaaataaaaatgttatgtgttccagggacaaaatagatgccgttctgagacggcaacatcgtaagaaatggaaaagacctatggtgcgcagcttacacaccgcaggtaaaaaatcggctactattcttatatacatcacgctttggatatctcttatttacttgtaatatttatcatttttaaaaaaatagcaaatggttctttccaatcatcgtagaatcgtttagctgaagatggaatagaattcccactttttaagtacgaaaggatacattcatctaattcttgtttagtgtatttggcttttttggtagctaaaatcgtgatattagcggcctccacaaatgaaccaaaggatccgtagcgatatattattactgactgactatacaaaaaagcagttctagatttaaaagttgatccgttttggcgaattatttcttttgccgccctcatgatttcttccttagatataaattcagtactttttgatacttcagaccctatttcttcttgaaaattctgcatagtaccataaaaattatatataactttagcagtcggcaatccgttttcttttcgtaaatcttttaatgtaatttttctatgagtttgtaagtatctacgacaagtagctacaactttttctttcgaccaaaattcataattcaaacctaatccgagagcaattttaatgtcgctgaagtttttatgctccggataacgagataaaatacaaggaagagacggcagttcattttcttttaccaaatcagcttgcttaaaatccggattaatttttgaatattccagcaatctctgccaaatgttttctctattccatacaatatcgattttaagtccaaaagccaacttcaattccttcattgaaccataatatttaacaacgtacattacagatggcaaaccatttttgtcccttgtgaaatcaacttttctaatacccttatgtttctcaatgaaagccccaacgattgcatcaaatttctcttttgtcattttaccatcatcaattggtacttgttgagcagaggaatctaaatcaggattgattgttcctcctgacataaattttctagctttttcttccagcataaagtcgcgcatttctttatcgctttttgataaattgcagtctacgcacaaaatttggcaattatctaatgtagattttcctcccttggcatatgccaaaatatggtcaaagtggtattctgcttttgacacaagaacttttccaaatacagcacatttaatttgcccattatttctctctaaatttgataaaacggcttgatattgaatactatcggaaaaaagcctatcattcataattgtacccaccgccttatgttgccagcatatttgcaatagtttttatatatataaaaacccagtaaccatcatggtttctgggtttttcgggctgacatctattttgtcaaccgtacgtggtgcaggtaacaggacttgaacctgcatgaagttgccctcatacggacctgaaccgtacgcgtctgccaattccgccatacctgcatatataagtttaccaattacatttggtaaacttttttttgcgccgccttacgcgacgctgtatattataacaaaacgaactgaaaaagtcaatctttcgggaaaagttttcagcttaaatttaccgttccttctgaatttccatttaaattgcatcgggcgcggatgaaatacccttctgagcagcttccgctttatcatttttctgcgccgcccttgtcaggatatcgagcgcgcggttctgatatgcctcttcctcgtcctgcgcttcccgcggtgcaacgttttccgccgcttgctcggcgcagcctgttcttttgtccggaacgttctctttctcatttgcctgcgaatcgccttctggccttgctgcggccggattgtcagccgccgctggtttctccgctgaagccaatggcgctgcgtcagcttttaatctattcttatccagctgttccagctgcgctttttgctccttggtctgcggccgtttgaagtgcgcatattctcccaagtccatgatgatgatggaatggcttgttttgcggctgcttgcaatcaccatgttttcataatcgccgtacaaataacgcaggtatttatcgtattccttcggaatggggaaccggtagccttcaaaatcccaaaaaaccgtctcgctgagccattccttcgggaaatcccccttatacacgttgcggcccattccgtcgtacagatatttcgcgtcttttttatgttcgaaccatttcaggcacttaaactgcattttttcacagaaggaaagcggcaaaaccgcttttaaaatatttgcggcgaacgactggaatttatgcccgttatcgatttttctgcggtgccatttattaaatacgagcgaccgcgtcaaaagcgtaagctgtaaatgaatctttctgccaagctttgaattcgccgtgttgtcatgcgagagcacatcgaaaaagaggccgttgtgcatatcgagaaatttactcgtgtactttgtcgcaaacatggtgttgtcgatgcgcagcttcgtaaagatacagtagttgagcgggtcggtatccgcagtatgaagcgttacgtttggaggaagctccgactgcgcgaccctgaggaatttgtcatagtcctcacgcagcatcataacgtcggcgtcgtcgtcccacgggatgaatccgtgatggcgcaccgcgccgagcagcgttcctcccgcgaggaaataacggatattatgcttgcggcagatacggtcgatgtcgagcaggtatcccagaagaatattttggataatattgagcttgccttgataggaatccttaaatacaaactggccgtcgcgcacgcggctgctttcaacaagcatctggattgcgtcctccaggctgattttcggcttacagccgcagcagatgattttttgattgttcatagccgcgccatagcacgggtctttttcgctgtattcgagcgacaccttcgtatcgtccgggtaaatatcgtggagtgttgcgatgagcatcccaatcgatacggtcgatttcttgccgacgacgttaaacagcgtattctcccgcaggccggccatcgcgtggaacacggcgttgaggatatcgctgatatagacaaatgaatatttgtttttactgctgagcagacggtattcctcgccctttgccaccgccttgaacaggtctgttatgatgctgtcgtcaaagccagtacaggcacccagcgcgattccggtacgcagaatcacataggaaaagccgagctgcttcgcgtaaatagggcaaagtgattcaattgtctgcacaagctcgcattcaaaggcggacgcccgcgaaaaatcgactgtgccgtcctcatattctgacgcgaccaccccgcgttccagtacgccataccggcggtaatcagatagcaaaataaaccgccgcgcgtttacatggtgcgcgagcgccagcatctttttcgcataatcgatttcaccaataaaaaactctggggtttgctccagccgcttgttgcagcagcccgtataaataaaatagtccgcagacaggcgctcgctgccgccagcctgttcaaacgtaaaaaattgaaagtcctgacgctttaaaagctgcggaaaatagccggtaatggcgctgctgtcgcgtccgacgagtataatcttcatggaaaggctgtgcaggtcgtttgccgcgaacagggaataaacaagacagcgggcaaacccatgatgcccgccggataccagaaccgttttattttgaagctctttggctggaaatttcttctgctgtgcaggaaaaaccgcccagtcatactcaaattcattcaggaaattcttcagttccatgatggctgtactcctcagcttactgattttgcaattcgacaatccgcacagaccttcggatgccctctgttatgttgacccttgcttcccagccgagcgcctgaagacgtgtgctgtcgagtatttcgggcgttgcgctaagataggagcgctgcggctccttttcatcctgcgcattttcaaacgtaagctttatcccgcgttcaggaaacgcttctgccgcctttttggcaaaaccgcgaatcgtcacattagagtgctccgcggcgatattgtaaggcgtcacgtcctgtccgcacaataggattttaagcagcgcaacggccgtgtcgcttacatagcagaaggaacggtatggcgcgccgctgcttttcaaaaggatatcctcacccctgacgacgttcgcgataaactgcgcccataccctgtcgtcctccaagcttgagggaccgtaaatataggagggccttgcaatttttacggaaaggcccttttgtctttgaaaacaggcgcaaagtgtctccgccgcgcgcttgccctgcgcgtaacaatttttgtaggatacctggtcaatatagcccacgtcggtttcagtgatggattcttttccgttgtgaagcgcgccgtacacctttaagctcgaaacaaaaagcgtgcttagtgctttgcatttatccgcgtaatcgagcaccttgtacgtacccgtcaggtttgcgtcgattgtgccgattgggtcgtgctcaaagaaataggcgcttgcctggcttgcggcatggataatgaaatccgccttttcttcaatggcaatatcatccgtgacatcctgcacgacaagctttaaatcatgccgcccaagcaggccgccgaaccgcttttccgccttttccctgttgcgtaccagcgcaatgaccgttatcccgtcctggtacaggtcgttgcgtatcaaaagcgccgttgtcaggtaatagccgataaagccggcggcacccgtcagcaggagcgtttttccgcgcagccgctcccaggggaccatatccgaatccgctaccgcggcgatatcttcgtaaatataggggtggaggatagacttgacgtcagatgccatacataagctcctccctggcaaaattcttgtagcggctgtaataatagtaagcgcgcaggctgctcaaatcctcaggcgtggtaaccttgatattgttcctgtcgccgataaatatgtggacctcctcgcccagctcgattaaaagctcgctgcttgaagtcgggttcgtaataccgcggcgttccgcctcgtcgtgcgcccacatgattttacgcatcgtatagccctgcggcgcctgcgtaatgaacatttcattgcgcggcatacttttgccgcaatgctttccgtccgggctgacgagaacggagtcgatactcggcgtgacgggaacagccgtttcatatgcccgtgccgttgcaatgcagtcggaaatcagtttttcagagagcagcgggcgaacgccgtcacaaatgagcacgatgtcgtccggcaaagcggttttattgatttcaaccagcccgttgtggatggagccgtggccgtttgcaccgccgggaacgattgtcttgacctttgtgatgttatactgcgtgatatattcctgaagcttgtcgatccacgactcgagacaggaaatcacaatttcgtccacctgggtatggttctggaaattttcaagcgtcctgatgatgatgggcttaccatctacctccaggaactgtttcgggatatcgacggacttcattcttgcgccgactccgccggcaaaaatcattgcggataccatttttcaacactcctgtccaagattatccttattccaccctttttgattccctcattactttttgtcgctgctgtaaagcgcaagcgcttcgtttacgtccccgtcgaacacgacctttccctttttcagataaatggcgcgcgggcagatttccctgacgccgtccatggaatggctgacataaaggaccgtcttgccgctttttataatttcagctatcttgtttttacatttctttttaaacgacttgtcgcctacgctcagcgcttcatcgattaccaggatatccggatcgatattgacgttgattgcaaagccaagcctcattttcataccgctcgagtatgtcctgaccggctggtcaatatagtcgcctagctgggcgaactcaatgatatcgtcctcgatttgggcaatataatggtccttcaggcccaggatatatcccttgagatatatattttccctgcccgtcatttcaagggagaagccagccgtaagctccaggagagccgcgacctttcccctgacgtccaccctgccctccgttgggaacgtaacgcccgttatcattttaagcatggtagacttgccggcgccgttgtctccgatgatgccgatggattccccctgattgattttcaagcttacatccttgagcgcgagatgcttcttggcgtttcttggtttaaaaaagagcgccttgaaacggtctgcgtcgtttttatataaagtgtattccttcgtaacattttcaaaaactataatcggttcttccgccattacacaggctcctttcagataaacgaatccgttttacagcacatccgcgagtcttttgcgcaggcgcctgtagttgaacgcaccaagcacgaagagcgccgcgaattcaagaaggaaaataatcgtttcagacggataacacgtaaaccagcggtcataaaggaacgtattacggtaaccgttggcaaaatagttgatgggatttaaaagcatgattttcctgagccactcgtagggtacgtcatagctgttgtaaacaaggccggaaagccagaacaggcccgtcataatggaatttatcatgttctggaagtcaaggctgaacgcgcacatcggcgcggtcgaccaggtgagtaccaaaaagaaaaggaacatcagggggcaataatagaaaaattgcaggttataaatgctcgggccatgcgcaaagagcatataaatatacatcagccccgacaaaagcaggtggacatacagcctcgagatggtcgtatacgtcataatcgtggagacggggaacgaaaccttcgtcacaaactgcctgttctccctgatacatttggagccctgcaatatacagtcctgcataaagaaccatggaataaaaccgacaagcataaagatgaaccgcccgtatgtctctaccgaaccgtttaccaggacctttacgccgcctgcgcttctcaggccgacatcgaacgcgaaccaatatacgaacagcgtgaaaatcggcttgaccacagcccaaaacggcccgattaccgcacccttgtaggtttttatcaattcattctttgcaagcagaaaaatctgtctgccgaaatgcctgtgttccctgaaaattgtaaacaagcctcgaccacatcctattatccttatattataaaattacccattctttattattttatattttttttctgatttgtcaatctttcggtaaatctttgactatattctacaaaacacaaaagctttaatgcctgcctgtttttatacaaaaagcagcgggccgtacagcccgccgcttttaaattttctgaggattttcgcgatgttttctttatttccagctgcctgagccgatatcgaagcaggcgtttgccccggggatttgcaggtcatccgtctggtttttcccattgctgctgaatattatctttgtatacttttgcgggatttcaacaaaatacctgccgtccgcgccctgttccatctggacgccgggccaagtaagcggcgtgtcgccttctacccaataatacgcggtgacgcagtcccatccgtttgcgttctccgcatataccgtacgggtatccggcacgggcgtgtcgccgccctgcgcatagtctgaccacgcgccgcttgcgttgttaaacattttcccgtctgcgggaattttaaggtcagccgactgtgcggtaccgttgttactgaacacgatgctgtcataagcctttggcacaatcaccttgtaggtgtccgcgcccaccttttccatcgcggtaccgggccatttggcagcatccgcctttgtgccttcgttccagtaataggcatacggcgcgctccagcctgccgcgtttttcaggtaaaccgtatagctgtccgccggcttgtccgtcggctgctcggtcggcgcctcagtgggcttttcagtcggcgcctgggtcgggtcggtcgggcgtgccgtaggtgcctgtgtcggctcttccgtaccgaagattttacctatttcgcagctggttgccatcttggcaatatatttctgcatttcaaggatatcaacgagcgtgaccccgccggacctgtctacgtccgctatcagtatcattttctcgttatatctgatttttgccgcgagataattctgcatgctcaggacatccgcgactgtaatagcgccgtcctcgtccacgtctcccagcatatacgtaaagccgggctgcggctcgtctgtgggccgctccgtcggtttttccgtgggcggctgggtcgggagcgtcgggtcggtaccgggctcttccgaatcgttcgcgtagattgttgcagatttataagggcttctctcgcaggaaaccgttaccgcggatgcgttcgccaccgcggaaacctgcgcgctccacgcgcctgtcagctcgtctgccgccgccgtatatgtcttggtgccgcttttgattgttacggtcgattcgcagggcgccttgccgctgatggcagtcgcgccgtttttcacgttattcaccgcaggcgcttttaatttcagctgccgcttagccgcctgcattttgttaagcatggcgtttacttcgctgtcggaagcgtccccaccctttgcaataacggcgtccgcctgcgggacaaggttataaacaggggtaagcgtatccgctgtaaagtccgaggcggtgaagttcttgacctccctcgtctcttttttgagcattcccatcggggttttgtcctcagcctgtgctgtgacaggcttcgctgtaaagttagaaccgtcgccttcgaccgaaatccacgtttcgccctcgagccccgtaatgtccccggactgcatctggccgctgccgacaatcgagttgttgacaatcaggttatagctgccctttacgtccttcagctcgaacgtataccagccgtcctcaagcttgccctctgtgagctttgtgccgggccagccgccgagcggcgtggtggtgccgttattgtcctgccagacataaaggctcatcggattgcccgtatagccctccgcctgctggacgtgaatcagcgcgtggtctattttcgttccctgttcgttcgggtcaagctttttaaaggatacgttcttatttgtggtgccgaggtcgttcgtcgccttgagggttaccttgacggtatcacccgcataggcggtcgcaccgatagtaagcttgtcgccgtcgaataccttgaccttctgggcaccgtctacagaggcgatagcatagtcggcatttttaatagaaacggtcacatcctgcgtgcctgtgaattcgctttctccctttaaggatacgagcggcatgccgctgggctcttcaatcagtatggtgccgttttttccgctgttaaaggtaaccttgccgtttgtaacctcggcctggtcgtcgtcataggcgtttacgaccgtcgtgccgtccttccaaagggaagaaacatcgaccgtaacactcgtgttgctgttcgcgtctatgaccgccgcaaccttatctgtaataccgtttttgttataggctcttgtaaaggcatagccgttagtcgcggttgtgtccgcatgggagccgccgccgaccgcgatatggttgttgcggaaacgcccgaccgtctgccagtgctcaagggttgcggtgttcattgagctccagttcatgtctccgcgcacctcatggtcgccgtttgactggtagccgctttccacggggcggtccgtttcgtcgccgtagaatatctgcactccgcccggcagcagcaggaacgccgagcccatatgtattttgtcgccggtcgcaataacagagtcgtgcgaggaaacatacgacaggacgttaaaatccgggtcgctgttgattgcatccgcgtaaaacttgtatacgccgccgacttggccctttgcaagcaggccgccgccctgcgtcgagaagtttatcatcgaatcgaagccgttggaatagtagtcgtccttgccgacgccgtggtcccaatgctcgcccgtcatccagaaatcgaggttgtcaagcgccttgtcgggattgttctgcttccactcgcgcagcgcgctgacgcattcgttcttgaggtttttccaggaagcaagctctacatgcttcgcggtgtcacagcggaagccgtcgactccgtattccctgacccactcggaaagccagaacgcaaggtaattcgtaaccgtctttgctttccctgtcttgctgaagtattggtcgagcttctgcatctgctcagtatagcggccctcgcccttccatttgttctgaaggaaggcaggaaccgtcacggatttcgtggattccgttttaaagtcgggaaggccggaaaggcagcccgtcacttcgccgctgccggaaccgccgtagcccgcaaggcccgcgcgtacccagtcgtcgccccaccaattgccccagtcggacgcgctcgactcatagtcgataaagctgtggtaatccgtgttgtttacgttcttctgggaataataatagctttcccagccgcttttcagcgtaccaaaatcatattcagccatgtccttgatggtgttgtagcccgcatggttcaatacgatatccatcacgatacggataccgttcttgtgcgccgtatccacaagcgtacggaactcctcggccgtgccgaagttcgcgtccgtgttcgtgtaatccatcgcataatagccgtgataggcgtaatgcgggaagctcgggtttccgtcgccgcccacgacatagccgtgaatctgctcatagggagcgctcagccaaatggcgtttacgcccaggtctgtaaaatagccttcttctatcttttccgtaatgccggcgaaatcgccgccatggaacgtggcgctggggtctacgccctgcacgacgttgccgttctcatcaagccctcttccataggagtggtcgttcgatgtgtctccgttgttaaaacggtccgtgagcaaaaaatataccgttgcgttgtcccacgaaaacgtggaagccccttttgccgcggccgctgaggcggcctcctccatcgtcgcatatgccgaaacgggcatagcagtacacagcacacagctaagcatgagtgccagtacgagggcgacggagactgcctttttgcagaatccagtcttacaattcattcttttgtacatcctttcatttgtttttaccattatccgagggtactcgcttcctacacggtaccaacaaaattataacaaggccagtccggaaagtatacaagtatactaaccaaagaacgcttttaattcttgtgcatatttccttttatgtaaacgatttcctccgcataaaaagcggccggcgccctttcgggagccagccggggaaatttcttcacaatagtatcgacaggcctacgccctgatacggaaggttttcggcgcgagcctgtaaatcaggatacaggcggccacacagtacacaacgcaaaatataatagtcatcaggccaaacataattgtgggcattttaagctgcatcatgaaaaaacagacaaagtatgtaaccgaatggacaatctggtacgtgccgctcttcatctcggtacccgcgttatacggttgcagcaggtagtaaaccgtaaggtaatgtgtggaaaaaaacacgctcaggcacaaaatagaaataaacagcaccgcgtaattcaaaggattatcggtgccgccggacgcatagagcagcaccgacagccccgcgccgataacagcggcgggaaggagattgaccttaataatctcccgcaggcggatttgaaacagcctgagtacaaaacgcggctgcttatagaaggaataggtcagaaggctgtggtcgcagttcataaacagcgcctgcgtaaagcctgtaccgcggttgattgcatacatgatgaacacaaaatacggaagatatgtcaatagcatgccgtttaccggctccttagcttccggcgccaggtaaaacgccagcagcgcgcctaaaacgaggcacaggcaaaccacggcaattttttttgatgccttccacaaaattttctgatgccgcctgataaacagctcgtttaaaaactcaaacccttttcggcggctcgtaatcgccgtgtcggcggatatcgccttccggctctgctcccgcgccagcttttttgcgctgtccatctggtgcatagattttacaaaaagctgctggtacatctcccggtagcctcggaaggaaagaattttccacacggcggcagctccgccggctatggataaagccatcagcgccgctactgccgtttcgggcaggatgagcccggctgccggcagcccatacgccgcgcccagcagcaggataatggacagccacgtcagtttcccggggccgttctcgtttgtcggcctccctgttttttcaaaaacgataagggaaaccgcggcggaaataagcttcagccccgcgacaaaaaacgggataagaaggcatatccaaattgcaatcccctgcagcagcccaaatataaccgccgccggcaaaaagcctatgacgacctttattatggcgtaccagtagttaacaagcgtatattgccgcgcgtccatacgcagtaaaaccattgcgtaatatttgtcgcgggatgggtcgaacataaatgtgttcagcagcgcgccgattaccgacaggaacaataggatgtggagagaaagccgggacggctgcgccggctggtaaagggagccgaagccgtaaagcatcaccgcaaaataaatagcctttccaagaaagacagaaacgatttcccataggacggaaaggacgttcgcaaaaaccttaaaggcgtggacacggtagagcgtttcgggcagcagcctctttaagaggggaatttgcttgagcgaatataaaatgccgttgacccggtatgtatttttaagggaaaaagaaagcctgagcgtcttattcatggttttcctcccgcagcgccgcgatgattttctccttaaactcccggtcgccgagattgcttttatctacaatctccaggacgccgtggttgagcaatacgatttcatcacacaaatcgagcgccaaatccataatatgtgtggaaaaaattgtaatccgccccgtcttgagcgaacgcaggagctgcttcatctcctccgccacaacgacatctaaagaggtcagcggctcgtcgagcaggaggatattcggctgggcgatgatattgatgagcatctgcatcttgttcttcattccatgggaataatccttgagcagcttgtcgcggtcctcaggctcgatgctcatataggaaaaataatcgtcaatgggctttatatcctgaatgcttttttcgttgatatccagaaaaaacttaaggaactcgcgcccggtgaggaattccggcacggttggcgtagacagcacataaccgatgtcctccgcccgcacccccctcttcttcccgccctcctccagacagaagcttcccgcgtctgctttgatatcgcggttaatgcagttgaacagcgtggttttgcccgcgccgtttcgcccgagcagcccatagattttatcctcttcaaaggtgaaatcgatgtcgcgcaggacttctttcttttcaaaattcttcgacaggtgctcaattataaatttcataagctgttctccttttttgtctcggcttctattacatttccttctcgtacttaaccaaatggtaaacaaagctgccaatcacaagcaggtaagcgaaaaccagcagcaaaaccgcggcaaaatcgacgcccataatcgcaaaggaaatcagcagggcgctgaacacataaaccatcaaatcaaacgccttgcccttggcatggcagcgtatggcgatgttgcgttcgtccttttcctcgatttccagctgtttttctaaatcgggcgatttgcgtagcgccaggcggctcaaaaccccgcctaacccatggccgaacagcccgcagccgattccaacgccaatataaggcgccgcccgcataagtccctgcaaatcctcaaaggttttcagggccacaagccccgcggcaagcagcagcagccccgccgctgtgaatatatagtccagccatttccttttcaagcctcttcctcctcatagataaaaatatcctcgatacacataccgaaataacgcgcgattttaaacgccagcacaatcgaggggttatacctgccgtgctccaatgacccgatggtctgacgggatacctcgagtgcaagcgccaggtcctcttgcctgacacctcgggccttcctgatttcctccaaacggtttttcaaagttctccacctctcaaacggaaagcttgctttccatatttccattatacggatgtgccgctctatgtcaaggaaactttccatttaaagcataaaaatcccgctgaagtctatcagcgggaaaaagggctgcgcgccggcaggcgcatatctatcatacggtcgtcacgcacaaggccgtccgattcctccactatgaaatccggatggtccttttgcagggtttgtacaatttcataaaagctcatatttatatttgcgttaaagaggtacgtatcgggcggcagccccattgccgtgagcagagcctgcgccgtatcccacaggtaagaacaggatggataccagtcccttcccgcgcggataacgccgttgtcctttatttgccttgataaaaaatccaccatattgttactgcccggctcccggccgatttgccagccgagccggacaatgcgcgcgtcaggattcacgcttctaatcatcttttcacagcggattttatattttccgtaatctgtggccgaaaagggttcgtcctctggcgtgtacggaccgctgtttttgtcgctcaggacgtctaccgtactcgtaaaaagaaacccggcgccgttttgaaagcaggcctgcgccatatcgcttgcccactgttccggccccaaagcgatgtgcagcacataatccgcccgctcctgtaaaagaaactcccttgttttaatcgcgtcgtccgttgggacggcttgcctgttccatggaacaacggtatggccccgctccataagcgcttttgccgcgtatggcgctaccgtgccgttcattcccgtaacgatgattttcataccgcttccccttctttacagcgccgagatacacacgccgcccggcatcaggaaagcgccgtcgtgcaaacgtgaaaacagtaccttctgttcattcattgcaattttttccttacccgcgttgatggtgaccttgacgcggtttgccctttcatcggtttttatatattcaagaacacggtttcccggctttgtttcaacaaacgcaagctccccgcttttaaaagccggaatttctttgcgcaggcggattaatgccttcatcgttttcatgcgttccttaaattccccggcgtctatgccgtcccacggcatacagcggcggcagtccgggtccgggcctccctcgagcgcgatttccgtcccataatatatgcaggggctgccctgcaaggtaaacaggattgcaagctgctggtagaacacgtcctcgtcctgtgtgcggtaaatcaggcgctccgtgtcgtgggaatcgagcaaattaaagagcgcctcgtttgtctgctccatgtacatggcgcggcagcggtttatactatgggcgaaatcctttcttgtaagcgtgggctcaagccaaaacccggaaatcgcttctgtcaggggatagttcattaccgcgtccagctcgtcgccctgcagccatttggtagaatcgtgccagatttcacccaacaggtaaacgtcagggtttaccgccttaacatgctttctcagcgtgcgcaggaaatcgtgggagacctcgtttgccacgtcgaaacggaatccatcgacgccgcactgcgtcatccagtattcgcagacgttacaaaaatacgcggcgacctcgctgttgttcgtattgagcttcggcatcctgttggaaaacgcaaaggagtaataccgcccgtcgcgcgtgccgtcctttttatcgtcaaccggaaactcgtttatcataaaccagtcccggtatttcgaccgctcgccgtttttgagcacgtcgcgccatggggcaaagcctgtgccgcagtggttgaacaccgcgtcgagcataattttaatgccacgcctgtgcgcctcatcgcagagcgttttcatcagcgcgttgtcgccgaacgacgaatcgattttcatgtagtcagacgtatcgtatttatgcgtggttgacgcctcaaacagcggattgaaataaatgccggtaatcccaagctcctttaaataatcgagcctgctgattacgccctgtaaatccccgccgtagcagtcgccatggcgcggccgctccgatttccacggcttcgcccccttcgggtcgttgcagggattcccattgcagaaccgttccgggaaaatctgataccagaccgtatcctttacccatgcgggcgtgacgttcaggtcagccccgttcatccacggaaatacaaaatgctgcagccgcacacccgggatttggagtctgtcctccgtcagaaagccgttctcaaaataaaagagcgtatcatttccgtcagacaattcaaaatagtatttgcaccttttatattttggcgttacccgcgcgctccaccagatatgcccgcaaagctccatctcccttaccatagaaagcttctgcccgctccagcgctcgtgtccgccgagaatccccgcctcgaacgggtcgccatagcaaaggataaccgactctatatcataccctgtcctgatatggataaccagctcgtcctggttcctctgataacagtattggtcgcctgttttatggtaaaccgcttcgcaattcacgctaaccgcctccgattcatttagaacaaaacaacatcattgtaaaccattacagctgcaaaagaaagtcatcttctcactttttatagcaattttctgacataaaaagaaaagaagcggtacaaaaccgcttcttcataatgcttacgtttatcatgggataaattattccttttcgtcgccgcggatggcggtacggcggatttttccgctgatggttttgggcagctcgcctacaaactcgaccaccctggggtatttgtagggcgccgtctgcttttttacatagtcctggatttcctttttcagctcgtcgctcgccgtgtagccctttgcaagcacgatggtcgccttgacgacctgtcccctgattgggtcgggtacgccggtaatcgcgcattcgaggcagcatgggtgctccatgagcacactctcaatttcaaacgggccgatgcggtagccggaacttttgataatgtcgtcggtacgcccgacaaaccagtaatatccgtcctcgtcacgccatgcggtgtcgcccgtatgataaatgccgtcgtcccagaccgtctttgtcagcgcgtcgtcctcataatagccgcagaacatgccgcagggcttacatttatcggtccgcaccacgatttccccaacggtgcccggctcgacggaattgccctgtgcgtcgattaaatcaatatcgtacgcgggagacggcttgcccatggaaccaggcttcggctccgttcccacggcgttgaagagcgtgagcgtcgtttctgtctgtccaaagccttccatgagctttaagcccgtggactggtagaactggttgaatacctcggggtttaaaggctcgcccgcgatggtcgcatggcggatgctcgacaaatcgtatttatctaaatcctccttgataaagaagcggtacatggtcggaggcgcgcagaaggtcgtaatcttatatttttcaaacagcggcaaaagctcgctgggcgtgaacttgtcaaaatcgcagacaaaaatacccgcttccataaaccactggccatagagcttgccccacatggctttcatccagccggtgtcggaaagcgtcaggtgcaggccgtcgggaacgacgtcgtgccagtatttcgccgtgatgatatgcccgagcgggtacgtctggtcgtgccataccatttttggcattccggtcgttccggaggtaaagtataggagcatagggtctgtggccagcgtctcgatacgctcaagctgagcggaatatttagaaagctccgtgtcaaagtcgacccagccttcccttttgcccctgacgctgattttcaccttgagcgtcgggctttccggagccgccgcgtccacatgctccatgacctcgccgtcggtcgtacagatgacagccgtgacatgcgccgcgttaaaacggtaaacaaggtcttttttcgtcagcaggttggttgcgggaataccgactgccccaatcttatggagcccgagaagcgcaaaccagaactggtaatgcctttttaaaatcaatacgacggtgtcgccgcgtttaatgccaagctcggtaaacatattcgccgccatattgctgtattttgaaatatcggcaaagctgaaggtatgctcctcgcccttgtcgttgcaccacagcatggcgcggcgctcaggctcagcctttgcgatttcgtcgatgacgtcgtaagcaaaattaaagttcttttcataaaccggttcgaagccggccagctgtccgttgtaaaaagtttctttgcagaatttctgatggatattaagcattttggccgatgttcctttccttcacacaattttaaatttatttgttattccttttcttttttgggcggatggatcgtgatggccaaaaactcgcagtcctctcctcccgtcgcgatcatgccatgccccctgccggaatcgtagtaaatacagtcgccttcacccagaatttcaatatggtcctccatcgcgaccttgaggctgccttttaaaatatagtcgaattcctgcccctcgtgcagagaaaggctgatgggcttttcctgctcgtcttcgatgtacggggcgtttacgaggaacgcctcggcaagcttgttcttaaagcggtaacacaaatgctggtatttaaagccgcgcctgcgcttgatgtcgagcccgcggccttttctcatgatggaatagtgcgaaaggtgcgggttttcgcctgtcagcagctctacaatatccacgccgagcttgtcggcacagttatacaaaaaggtaaagctgaaatcacattcgccgttttcgtgctttaaataggcttcctccgtcagtcccgtcgcccgcgccatatccgcaggggagatttcaagcagctcgcgcagccctttgatgcgctgggccgtttctacaattcttgtttccataaaagcaaccgtcctttatcaatttaaaaacatatgtacaaaacagccggcggcggacgaatttctccttcatttctgccgcggacctattcttttccagtataagagaataaaaaaacgttgtcaaccgtaacatggggtcaaaaacacaaatgaaaagctcccccgtgtgtgcgggggagcccattgttatccggattcaagcgtagcgccgatgtcgtgccccaggtcgcaggaataaatccattcgacccggtccccgtcttttaaaggcacgtcgctgctgctctttgacaggaatttcccattgacgctgaaaaaccagccgctttgttccccgcaggaaaactcatagagaaaattgatgccctcgatatacgcgccggccgcggcgttattccctccgccctggtattccaaatggattttctcagccttcgccgccctttgaagcaaatcgaacacggtatcgccgtctgaaataggataagacgtttcctttaaaattacgccgtccttggggatgtcgccgctctccttgagcgcctggccgaggtcgtcccaattgctaagaaccgttttacaggtaatactcaggatggccgtttgtgtttggccttgcgcattgctttccgttgcgtaatggctgtctaccgattcaaccccgcaggataccggcagaatcatgaggcataaaagcaggaaaaagcaaaggaggcttttgtatgcgataggattatggcgcttcatgcttatcctcccctgcggggttttcttctatcgtcccgccaggctcctcttccggatgctcttcccggtaggttttgaggcttgcaaaaaagtcatcttcctctttcccctgtaccttcccgctgcgcatttttgcaaaatggaagcccagccctcccgctataagcgcggcgccgattatgacgaagatgattgggttaatcccattgccctcctccggcgtttcgcccggtgctttttccccgcccgtttgggacgacgcctgcgcgcctgcattcgcccgtaccgcttgggaggacgagccggagccgctgcctgtttcctttccggcggatgattcccccttactggaagcaccctgcgggctggaagaggagctgccgtttactgtagagctgctctcccgtagttcggccgaaccggatgccccgccctgctgcgtttgggccgcaccgacggatggcccgccgctttgcccggaagagccgctgtccggcgacgtttttttatccgcgccgctgcccgtaccggaggacgtgcccccgcttgaaacggccttcatcgttacgccgtccgtatagtcgtaaaggcgggccatgccgttatacaggcggtacagggacaccagcgcgcaaagcgcctgttcccccgccatgctgtcggagccctctccccttaggtgcgcaaagccgccgtcgccctgctggaaagacatgagcgcgtcaaccggggagctgccgtttttgataaaccgtttatcgccctgcgggtcgattccaagcgaacagagcgcaacgattacctggcttatgctttcgctcgtctcttcgcctgaggcggtaaagccgccgctggagagctggagctccgacagccttgcagcagccgcttccgctgcctgcgtggctgttctggtaacctcctgctttccgtgcttgagcgtataggtatatttcctgcccgtggacacatacggcgcaagcgcgatgagcgccgcggccgtcgtgtcgcagtccgaaatgcttcccgcaaaggaaaaacccccgtccggaagctggtaagagagtatttcctttagaatagcttctctcgtgtagaaactgccggatgggactgcgtactgtttggaatcaagggcaacaagcccccaaatccagccgtttagcccctgttttccaagggaagcggtatatcccctgttataaacgccgtcggcaaccagattgacagggctgccgttttcgtccatgccgatgctgcgcgggtccccgcccgccgccagcaccgcaagcgtaatacggtgccactcggtcgccttcctgcggtcgagcctgtccgccgtcttatatttttctgtaatatacgcgcctatatgctttaaatacgctgcgcggtcgtccgtaatgccgtagcgccccgcagctatcatataccagtcacagccgtcccccgccgtttttgcaaagctttccgtaaacagcccgccggaaggagtgccgttctgcgcccttttccagcgcaggacgccgtttgccgccgcggttatatcgttcccgccgtatgccgatacaggcaaagccggcaggcagataagcaggcagagcacgcaggtacaaagcctgcgaaccgaatttttcataaataaaaccgtccttttcaggcctttgcgataactctctggattgcaagcacgtccgctacgctgacagccccgtccccgttaaagtcggcctgcgcgcgctcgatgacagtgaacatattcacaagcgcgatatatttttgaattgccagaacatccgacaccttcagctccccatcgttatcgatatcccccagcttacattcaggattctgcgccaaaacgagctggtagagcgcgcggtccgcgtccttctggctgatatcgagcgtctgcaccgccgccatggcttcgtcatacgccgcttttaccttaccatcggcaagcgccgcgccgccgtttctgttaaccactgcaagctgccttgtcagttcgtctttttcagcaacgggataaaaatcggaaatacccatccatttatccatttccatcgcgtttgcaaggccaacttccgcgccgtaccacagggaatactgcacgcgcagtatgtcgccctgccgcgggtaataatcgttcaggctcacctggagcggcttgccgttgaccgtaaagagccagccggaaagcgccgtgtaatcctgctcgccaagcgtactgccggagcccccgtcaatataatctccgatatggccgagcacgcactgcgggattttgtcggtattctcaaacccaatggattttaagtaatattggtcggtcagcgtgccgccgtaattgtgcgtaagcccgttttccttgaggacgcggtctagaatctgcgcgccgttctcgccctccttacaggtaacctcctccggcacagccgcatagccgttgccgatggaaaacgcctctgccgctaccacaagggtagggtttgttgtcgtcagctctttcgctgacgccgcagcgctcccgatactcaaaagcatgagtacggcaagcagcaggctcgtcaatttgattttgtttgttcttctttccatttttaattcctccgattaaaataattttccgcccagaatgaaaaaagcgccgtaaaacggcgcatgcggcaaaaagggtgcagtccccctgtgccggcaccttttcctccgaaacgtgtctacacaaaacaggcaggtctcctggctcgaattcctcctactcgccgcgtcttcccaattgctcagtgaccgccgccaaaggcggctgcgggctttcgtccttcttacagtagcggggactgccgcggatttgcaccgcgttcccttttcatgccccaaaggggcagcctgtttcgcacccttatcataaattcaaatgtctttcctgtcaaggctttaaagcgctttgtaaataagcttcccgtcgtaacggccggacttcgagcacagcgctatcgtgtactcttctattccgtaatgaatgtaaaagcggtattgtccattatcttcacagtgcagcgtgattggagtgccaagctcgaaataaaagctcgacggcggcaggtgaaagccccggccgaccgccttcatatagctttccttgagcgtccacagctcgtaaaatgttttttgctggtttgcgcttcttttcagctgcgcccgctccttttcatgaaagctgatatgcgcaatgccctcgtatttccgctcgcgcctttgttcaatatccacgcccaccggctcgctgtccacagcgagcactacgaaattgccgctgtgcgcaatattaaaatattcgccgctttcaagatacggctttccatgctccgcgattttaatctgcccgacgctttctttcccgagcaccttcgtaagcagcaggcccgccgcaaggcacagcagcttgtcgttttcattttgcaagcggcagaactgctcgtaacgccgcggggaaaggtagctttgcgcattttttacgtaataaagcgcactgtccgcctttgtataataaagcctcaccatattccgttatcctccgttgtccataggctccgggtcccctcccagggaacgccgcggcttccatatgccggtaaaatagaaaacaagcgacatgacggacgcaacagcccagcccgccggccaggatatccagataccgtccgtcccaagcgccccgttcaaaacaaacgccagcaccacgcgcagcaccaaatccgtgaaggtcgtaatcataaacggcaccatcgcgccggcgccgcgcagcacgccgtccgccattaattttgccgcgatgagaaaataaaaaggcgatacaatcgttaagaaccggcagccggccgatacagcctgtacgctcgactcatccaaaaacaacccgaccatctgcgggccgaaaaagaagaacaaaaccgcaaacggcagcgcgacgcacatcgccataatgattcccgagcgaaagccctgttttacccgcccgggcttgtccgcgccaatgttctgcgccgtaaagcttgaaaggccgttgccgagcgcagtaaacgaagtaagcgaaaacgtattgagcttgaccgccgcggaatagcccgcgatgacggccgagccgtagctgttgataagcccctggatacagaggttgcccacagaaataaagctctgctgcaaaatgctcggtacagcgattatactgattcgcttgagcatcgggaagctgaaaacctttgttttcccaggcgcctcgatttttttcaggcgtttaaaaaggacaaggcacgccagaacggaggccgcgccctgcgccaggaacgtcgcccaagcaacgccgcctacgcccatttggaacacggcgacaaagagcaaatcgagcaggatgttgccgaccgaagaggcaatcagcaggtataacggggttttcgagtcgcccaaagccgtgaacacgccggtggagatattgtataaaaacaggaacaaaagccccagaatataaatacgcagataaagcgcgctgtcggaaaaaatattctgcggcgtgttgagcagcaccatcagcgggctgcagaaaataagcgccaataccgtcagcacgacgctcagcgtcaaaatcgcgatgaacgaggtgctcaccgccgttttcatctcccggtagagcctgccgccgaacaattgggaaatgacgacgctgcaccctacgctgcacccgagcgcgaccgccatgaaaatcatcgtaaccgggaacgacgcgccgaccgccgcgagcgcgtcctctcccgcaaagcgccccgctacgacgctgtcggccatattgtaaagctgctggaatatgctgctgcataaaatcggcagggaaaacgcccataaaatccttgccggcttccctaccgtcatatccgttaccaaaagacaacccttcttacccactccgccggaactgtaccgggcttaatctgtaaaataaacagtactttttagtataaaacagcgttttttaaaagtcaacgcgccgccaaacaggaaaacgcggcgcgtttgcggaaatcctttacattttctggcgcatctactataataatacagaataaaccgataaggatgataacatgctacagtttgaagaactgcggctggagctggaacggctcctgcccgaaatagaggatttggccgacgcgctcgggctttcccccatgcgttcggaaatcgaacagctcgagcaccgcgcggcggagccgggcttttgggacgatatggagaattcccagaagattttgcagcgcacgagtatgctcaaaaacaaggtacaaagctacgaggatttgaaggcggcttacggggacaccatggcgctcattgagcttgccgacgaggaggaggacctctccctgctggaggaagcgcagcaggaggtgcagaaggtaaaggacaacctggaaacgcagcgcctttccaccctgctcaccggggaatatgacagcaaaaacgccatcctcaccttccatgccggttccggcggaacggaagcgcaggactgggcggaaatgctttaccgcatgtacaaccgctgggcggagcgccacgctttcaaggtcaagacgctcgattatctcgacggcgaagaggcggggctcaagagcgccgttatccttgttgagggcctcaacgcctacgggtatttaaagagcgaggcgggcgtacaccggctggtgcgcgtttccccgttcgattcctcaggcagaaggcacacgtcgttcgcttctttggaggtcatgccggaaatcgacgacaatattcaaatcgacatcaaccctgaggacatcaaaatggatgtgtaccgcgcaagcggcgcaggcggccagaaggtcaacaagacctcttccgccgtgcgtttgacgcacatcccgacgggtatcgtcgtatcctgccaggtggaacgcagccagcaccagaaccgcgaggtcgcaatgaaaatgctcatgtctaagctcatggaaatcaaggagcgcgagcacctggataaaatcgaggacattaagggcgtacagaaggaaatcacctggggcagccaaatccggtcctatgtatttatgccctatacgcttgcgaaggaccaccgcacgagctttgagtcgagtaatatcaacgccgtaatggacggcgacatcgacgggttcatcaacgcctatttaaaggcgcagagcttaaacgcgctggaaaacggcgtacaataaaacaagcgcaaaagcatacgcgccggcggaaatctgccggtgcgttttttcgtttttattgtagaacctgacaataatacaatgcttatgccggccttgcctgccgtgtattgcctttctatttttccattctgtcaaagcaaagcctttattttgttactttgaacaactggaaaaccctcttgttatgcagcctgacgattcctgcttttcttaaattttcatgataaaaacggcatgcttataaaaattcatagaaagttcacatttatacgttgttgaagcgcccctctttccttgctatcattggattgtaaaaagcatttgagacagccgcacgaagaggatgcggccgctattttggagggaccttatcttgagtgaaaggaaagaaaaaacaatccatgtatttaagctgattggcgaaaactttgtgcgttttctattctctgtattatttgtttccgtctttcagatgatttttggtgtggaaaacacgctggcgggcgtcgccgcaagcgtcgctatcaccatgtaccccgcgatggatacgggcttaaagccgcttccgatgtgcggcgtgattatcgggctgtttttaggctcggggattgccgcggagctttccgtcatatccccgtggcttgcgctgcccgtgcatttcctgttcgtcgccgctgtcatggtattgtgcggcacaccgcttgaaatcaagacgtttatctgctttttattgagcttcgtgttctgccaggctactcctgttccgctcgaggcgtttcccatgcggatgctctgcctgtttaccggcagcgtgctcactgccgtgtgtacgctcgtctggtggaagcacaagggctacggcacaaatgggatttccatccggaggcaaatccatttgagcgcgaaaaacagggggcttatcctgcgcatggccgccggcattaccatcgcaatgtttgccgcctccatgctggggctgaaaaagcccttgtggattagtattgtcgtaatgtcgctgacacagctgcagctgaacgaaacgctcacgcgcattaagcaccgcgcgttcggcaccgttgtgggcgtgctcgtgtttgtcgtggtattccagatgattgtcccgcagcagtactccatgctctttatccttttgatgagctacctgagcttctttacgccggagtataaatacaagcagattgtaaacgccgtatgcgctttaaacgcctcgctcgtcctgctcgacacgacgacggctatagaaaaccgcgtgctctgcctgctcggcggaatcgcgattgtgctgctaatgcatttgcttgaaaagctcgcggaacgaatcaaggagcatttcccctattttcgggcggttgtacgcagtatgctggcgaaggaatcgaatggagagtaggctctccactctttttttgaaacgttcgtttcttgtttttaagctttaaatgttaggatgaaaagagggaaaccattttaatggcttccctcttcttttttgaagcagcctgcttctctctttttatttgaaacgtcccgtttctttttatgaaacatactgcttcttggatttcttcatcaaactttatatgtttaatcaaaagggaaaaacaatccgctgtttttcccttttgtaaacccttttcgtcggtacaagggaaccctttcgatgggttcccttacggcttacgggcggcttaagctacgccgccctccgcctatccctccgcagccgattcaaggagcgaagccccttgaaaatccccctaagacgaaactatccgttcctcgttttatgtacggggtgtagaacagatactgcgggacgctcctgcgccgcgccttcgcgcggagtacctcgtggggttggtactttcttggtatgtggagtgctttgtgagcggtacttttgcgcggctttcgccggaacggtttatatgccttccacctgcttgtccgtatggtacgctatgcccacgcagtgcgtgagcgtttcttttatctgaccatatgcttttttgatggtgtcttcacgggacggcctgcctccgcttaccgcaaggctgccgagcacaaagctgtgctttagcgcctgccatccttcaggagaaaggcgcggttccccgagcgcctgcatccgctcaaagcagtaaagggcatagcctatttcgtccagcttccggtagctgaaatcgaggtacagctcttcgcgctccgtttcgccctgtaattcttttccttcggcgcaaagcccctgccggtgcgggtcttccgctatccggtgcaatagcccgtttagctcttccagatagctgttatgtatcacagagaaccccttctttccgtgtgccgtccttccgtaccgcctgtttctcctgtatgcctaagctcagctccaagcataaggcaatcatatcgcagccgctctcaatctccatctggctgccgcaggaggaaaggcttgccgtcaaacacgcaaggcaaaagtaatcttcatattcgcagtcgccaaacggtactacatcaaacgagcggaatacatagaacgccctgcccgcaaaccctattttctcgagtacgtccgcattaagttccgtttcctccaatagctccgaaagcaacttcttttctattgcttcatccataaacatcctccttttttaaaaataagtaattcattaaaacatctcttagttagtaatggtaacaaaattcatgtgacaatgtatacgctgccgcgtaattctcaaaaaaatataaatgtattaaagttcaattaaatatatttcaaaaaaacgaggcagtaggtacaagaattattgagaaatgcaaagaatcgggcatgaaagtaaacaagttagcaaatttatgtggtgttacaccttcaactttttatagcttggtgggctttcaactattaaaaaagtttgcgacggattggaaattactttgaaagaattttttgacgcaggatattttagtacattagaacaagaaattaaataaagtacaatgtacacgaggtactccgcgcgaaggcgcggcgctgaaacgtcccgcagtatcttttctacgccccgcacatcaaacgaggaacgacatggtttctattgtgtggggtttgtaaggggcgcagccccttgctcggctggaaagggtcaagggaaaacctgcgacgaggttttcccttgtcggcggaaaggtgattccaaaagagggaaaccgccgaaacggtttctcctcttttgattaaacatagaaagttttcattcaaaacccaagaagcagtatgcttcataaaaagaaacggcacgtttcaaataaaaagagaggaaacccatatgaatggtttccctctaaaagcagattgttttcttcaaaaaagaaagcgtaaaagagggggaacaccgaaatgttccccctcttttatcatagaaactttttgagctgtgtgatgttttcttcctcaataccgcagagcttctgcatcagggcaatcacgttctcgtccgcgccgttacacttatgcacgtcgcgtatcgccttgactacgcccatcgtgctgccgacaatcatcatctccgcaatatgggacggggttttatcggtaagcgtctgcatgtcaatcatcaggtatgtcctgaccttttcgtaagcgttcaggcccttttcgtctgtgccgaatttgttgagcatcgccttcgccgcggtgttaatcttgcggtattcctcgagctgcgcctccatatgccgcttgaaatcctcgccctcgatgatgccgagcagctggttgatggtgtttactcccatctgggagttctggtagacaaaatttaaaagggttatattttcattttctgccatgtgtaatcatctccttacaaaccagtattcccatcaatcaccaaaaatacagcgttttattctacttctcttatgtaactgtacaattttgcggaaaattctcatttatatagaaaacggcaacaagatatgctacaatgaactcgtcaaagcacaaaatatggtttttgttgcgtttttggaacttcacggcacgcggcaaaactttttattctgttgcttttgcaacctgtattttccaatttatttgttacaatggaatcagccttttacgcctgacgggtaattgtggagcaccacagtggcgcaaagggagagaacaagccgaccgtctgggcaatcctttaaagggttgcccttttttatttggataggaggatgtcagatgagagaacaatggactggatttcacgagggaagctgggtgaacgaaatcgacgtgcgcgatttcatccagaaaaactatacgccgtatgagggcggttcttcctttttggcgcaggcgacgccccgcactaaggagctgtacggcaagctcaacgagctgttccggcaggaacgggaaaagggcggggtgctcgatatcgacacgaccaccgtatcttccctaacgcactaccagccggggtacctcgacaaagaaaaggaaatcatcgtgggactacagaccgacgcgcccttaaagcgcggcgtcaacccgttcggcggcatccgcatggcaaggcaggcatgcgaggcctacgggtacaggctgtctgataaaatcgagcaggagttccagttccgcaccacgcacaacgacggtgtgttccgcgtatataccgatgaaatgcggcttgcaaggaaaacgggcgtgattaccggattgccggacgcgtacggcagggggcgcatcatcggagactaccgcagggccgcgctctacggaatcgaccacctgattgcctgcaaaaagcaggacaaggcgctcatcggcgcgggggtcatgaacgtcgaatccatccgcctgagcgaagagcttttcgagcagatttccttcctcgaaaagctcaagacgatggcgggcatgtacggttatgatatcagcgcccccgccaaggacgcgaaagaagccgtacagtggacgtattttgcctatcttgcttccatcaaggagcaaaacggcgccgccatgtccttgggccgcgtgagcacgttcctcgatatttacatcgagcgcgatttgaaaacaggcgtcctcacggaagaagccgcgcaggagctgatagacgattttgtcatgaagctgcgcatggcacgccacctgcgcacgccctcctataacgagctgttcggcggcgacccgatgtggattaccgaaagcctcggcggcatgggaaaagacggcaggacgctcgttacgaaaaactccttccggttcctcaacacgctttataccatgggctcttccccggagccgaacctaacggtgctctggtcgaaggctttgccggaggaattcaaaaaattctgcgcgaaggtatcggcggacaccgattccatccaatacgaaaacgatgatttgatgcgcccaatttacggcgacgactacggcatcgcctgctgcgtttccgcaatggaaatcggcaagcagatgcagttcttcggcgcgcgctgcaacctgccgaagcttttgctgcttgccttgaacggcgggtacgacacggtaagcggtatgcgcatcggcccgcagcaaaagccatacgaaaaggaaacgctcgattacgatgacgtcgtaagccggttcgattcctaccgcaaatggctctgcggcctttatgtgaatacaatgaacgtcatccattacatgcacgataaatacgcctatgaaaaaacgcagatggcgctgcacgacacagacgtccaccgttttatggcgttcggtgtggcgggcctttccgtgcttgcggactcgctgagcgcaatcaaatacgcggaggtccgccctgtgcgtgacgaaaacggctatattatcgattttacccgtgagggcggtttcccgaagtttggcaacgacgacgaccgcgtggacagtattgccgcaaacgagctgaaaaagacgtatgaagagctgaaaaaaacgcccgcctaccgcggcgcggagcatacgctgtcggcgcttacgattacctcgaacgtcgtgtacggcaagaaaacaggcgcgacgcccgacggaaggaaggccggcgagccgttcgcaccgggcgccaatcccatgcataaccgcgaggaaaacggcgcgctcgcttctttgaactcggtagcaaagctcccctaccagtactgccgcgacggcatttccaacacgttctccatcacgccggccacgctcggcaaaacagaggaggaacgtgaaaagaacctgatatccattcttgacggctatttttcaaacggcgcgcatcatatcaacgtgaatgtgctcgaccgtgaaaagctcgtcgcggcctatgaaaacccggccctgtacccgaaccttacgatacgtgtttccgggtatgccgtcaatttccataagctgtcgcgggaacagcagaaagaggtcatcagccgtaccttccacacggcgatgtaaggaggcgcgttatggcggagacagggcatatccattccatccagacgctcggcacgctcgacgggcccggcgtgcgctgcgtcgtatttatgcagggctgcccgctgcgctgtaaatactgccataatcccgacacgtgggatttaaccggcggcacggaaatggaggtacgggaggtcctgcggaaaatcctgcgttgcagggcgtatttcggcaaagacggcggtgtgaccgtatctgggggcgaagcgctgatgcagccggaatttgtagccgcgctgtttgcgctgtgccgtgaaaacggcgtgcatacggcgctcgatacgtccggctgtgttttaaatgaacaggtcctgaggctcttgaatttttgcgatttatgcctgctcgatataaaggcgtgcggcgaggaagcataccgcaggctctgcggcggctcgcttacaaaaacgctcatgttcctaagcgcgcttgaagaaaagcagattcccgtatggattcggcaggtaaccgtccccgggcttaacgacacgccaaaggatataacgcggctgaaaaaactgctttccccttaccggggcgtcgaaaaaattgagctgcttccctttcgcaagctctgtacggagaaatatggaaagctcggcattccttttccgtttagccatgtgccggaagcacaggatgaggcggttgccgcgctgcagctgttactggcagaaaaatagaacacctgtgaaaaggcgcgcggaaatgtttttattgcagtttctgccgccttttgttataataatatggaataaaacgtatccctaacgattggaaaggggaacctgcatggattacaagggttacgagtgtcctgtctgtcacgagcaattccaggacggagaggacatcgtggtttgtcccgaatgcggtacgccgcaccacagggcatgttatgaagaaaacggcgcctgcgcaaacgcgcagcggcatcaggagcattattcctgggcgaaggacgcaagcgaaaaagaacaggccgcgcaggacggcgaggggcttccctgcccgcagtgcggctacaggaataaaaaagacgccttgttctgcagccactgcggtacgccgatgacaagcgcgggcgcttaccagcagcaacagcagcagccgcagcaggggccggccgggcccttcggcggcgcagtgccgggcgcccaggttattttcgacccaatggcgggggtcaatcccgacgaggaatttgccgataacgtcaaggcttcggaccttgccgccgttgtcaaggtaaacacaccatattacctgacggtattcaaccgcatccgccagtttggcagcagccgcttcaactttgcggcgttcctgttttccggcggctggatgctttaccggaagcagtaccttgccggcgcgatttttacggttatcgtctttgctacgaccgtgctgtcgaacgtgtattatctcgattttgtcaatatgtcccagagcctttcccagtcgctcggggacagcgcctctgcttacagcgtaatgcaggccgccttttcgctgcccgcacagcagttctggctgttctgtatctccccgctgatggatatcgtgcggtttgttaccatgctcgtaagcggaatcatcggcaaccggctttattacaagcactgcgtcaaacgggtaaaaattacgaaggaacgcgttgatacgcccgccgaggcgaagaccgtgtttgaaaaaacaggcggcgtcaacaaggctgtcgtgattgtccttctgataacctatatggttttgagttttgccactgtattttttacaagcaacaattatataatcaattaagtcattcagaaaggaattgtgaagtatgaaaattaggaaagccgttatccccgccgcaggcctgggtaccagggtgcttcccgctacaaaatcgatgccgaaggaaatgttcccgattgtggacaagcccgcaatccaatatattgtggaggaagcggtccggtccggcattaccgacatccttatcattacaaacaggggcaagggcctgattgaagaccatttcgacagggctccggagcttgaagcgaatcttacaaagagcaataaaaactccgtgctggaggatattatcgatattacgcacctggcaaacatttattttgtccgccagaaggaaacaaggggcctgggccacgcaatcagccgcgcgcgctcctttgtcgcgggcgagccgttcgccgtgctttacggcgacgacgtgattatcggcgaagaaccggcctgcgggcagctgattgacgcgtatgaggaatacgggctgggcgtactcggcgtcaaaaaggtaaaggaagaggacatccacaaatacagctcccttcaggtggaaaacctgcgcgacaatatttttaaatgcaccgatatgattgaaaaacctgataaagaccatgtgatgtcgctgtattcgattcttggcagatgcgttctgccccctgagatttttgatatcctcgacgaaacgcagcccggagtcggcggtgaaatccagctgacggacgcaatgcgcaggcttgccgtaacaaaaggcatgacggcggtggatttcaagggcagaaggtacgatatgggcaacaagctcggtattttgcaggcgtctgttgaaatcgcgctgcagcacccggaggtcggggacggcttccgctcctatttaaaagagatttccaaaacgctttgaattaaaaacgaacacaaaaaaggggaccgcttaagcggtcccctttttaattatccgtttcattatgaaccgaagcttgttttcagccttcaaaaaatcaatctttcaggaaagcaagccattcttcgattgcctgggctaaaatgagctgctgttttaaaactgcctttcctgtttccggaatctcaggcagggtttctttttcccgtatgttttcttccaggtaagcctttaaggttttcacattgtcctcaatgcttgttaaacaaattttttgattttccggagaaaggcttgccaagtttacaattaccgcattgaaatcaaggaaaagccggacgggctggcaggaaattgcaagcatcaggcgttcaaattccttttcccctgcatccgttaaagaatagacggccttctccggcattttcccttcttttaccgtattgcctcttatgtaacccttgtgctcaagctggattacctttttatagattgagggggtactgattttcacccacttggatatgtttcggtattccaccagtttttgaatatcatatgcgctcagcgactcattttttaatatccccaatacgattaaatcgatggctgccataacgtcctccttttcccttgacaagtactataaattatagtagtataatcatcacgcttgaattactgtaatttatagtactgtatttattgaaatgtgtcaagagaaaggagcttttttatgaacggacaaaacaaaaaatggaattgctaggggccgcgccggtatccaaagcgcttttagcactgggactgccaaccatgattggtatgatgattaacgcgttatacaatttggtggacgcttactttgtcggcgggcttggaaccaatcaaatgggcgcgattaccgtagcgtttccactgggtcaggtcatcgtgggcctagggctgttattcggcaacggcgcggcttcctacctttccaggctgctggggcgcggggaccgggaaaaagcggataaggcggccagtaccgccatatacagcagtatttttgccggggcggcagttatcatctgctgtcttttttttctggagccaattttgaaacagcttggcgcaaacggagacgttttgccttatgcagtcaactataccagtatttatattgcgtcctccatcttcaatgtgtttaatgtcacaatgaacaatatcgtctcgagcgaaggcgcagccaaaacaaccatgttagtattaatgacaggcgctgtgctgaatgttttgttagaccccatttttatttacgctttgggcctgggggtagcaggcgccgcaatcgccacgggcatctctcagcttgtttccgcattggtatatttatgctatattttgagaaaaaagagcgcgttcagcttcagcattaagaactgctgtttttcaaaagaaattgtctctgagattttgaaaataggaattcccacgctggtgtttcaattgttaaccagcctttctatgtcaatgattaacggcggggcaagggcgtatggaacctccgcgcttgccgcaatggggcctttaacaaaaataatgtctgtgggaagcatgatggtgtttggttttttaaagggcctgcagccaattgccggatacagctatggctcacaaaaatacggccgcctgcaaaaagcagtcaaaacctctattgtctggtcaacggtattctgcgttgttttcggcctggcagtagctgtgttttcaactgagattgtatcagggttcacaaaagacgatatagagatgattcgtatcggcgcggcagccctgcgggcaaacagcctgacttttatattttttggcttctatactgtctattcatcgcttttcctcgcaatgggaaaggcgagagagggctgttttctcggcgcgtgccggcaggggatttgctttgtacccgccatcctgctcctgccgatgctttggggactaaacggcattctttacgcgcagccggcagccgacgccatttctgcattgattgctgtgtttatggccgtgcgtctacataaaaaactggcggctgaaaagaaacggttcctttctgccggcacagcgcaggtttaaaataatcattgtatttttataatccatgaaacgggaagaaaaacattttgatgaagcttttaaggtcttaacaagatacggctgcgttaagcatcagcacagaaaaaaggattaaaaaaaggaaccaaacggttcctcctttttatcaaagctcaaataaaacaggcctatgcttctcataaaccgtataatgcgtaaacccgcagccgcgcaggagcgcatacgcctcccctaccccgctcgctaaatcttcacagcagtgcgcgtctgagccgaccgtcacatactttccgccaagctctttaaaccgctctattacctcccggccgggcagcgtcttccccaactcctgccgcagccccgaggaattgacctccagcgccttgccgttgattgcaagcgtacgcaggattaagtctatctggtctttgaacagtcccgtgtccacgtccagcccaagctttttcttaatataccgcagcggataggtcaaatgcgcaaggctgtcaaaatggttccatctggcggtctggagcacctctgaaaaatagcggcgcagcagctcctccacctcgtcttcccggtaatcgagccaataaaaatcctgctcgcccgcgatattgtgcaccgacgcgagtataaaatcgaaatccgcaagcctcagggcacgcccggcggccgataggtcctgcatcggctccccaagctccagcccgcagtaaagcctgagctttccctcgtatttctttttcgcctgcgctatatcctttacgctctgcggaatccgtttgctgaaatccccaaattcgctgtgctgcgggtcgtcgtaaatatttgcctcgcagtggtctgttatcgtaagcgcgtaaagcccaagccctatcgcgctttcgcaaagctcctccaccgtatttttcgcgtcaaaggaattgctgctgtgcgtatggctgtcacagattttgcgtttgtccatttaatcaccttccgcgtaaagctgcataaaatatgctggctttcattttatcatatgcggccgcggtacgcaaatcgcgcgttatgaacggactggctgattttggtgaaatgggcgttttctattgacaccctgtcataaaacggtcataataatacccgaatcatatgaatgaaaagatggaggtattccctatgcgtgcgtttataacagtgattggcaaagacatggtcggcattctcgctaaggtgtcgcagaaatgcgccgaggtgggcgtaaatattacggaagtcacacagtccgttttacaggatatgtttgcgatgattatgctggtggatattgaaaaatccactgtgccgctcgaccagctttctgacgacctggaaaagctcggcaacgggctggggctgaaaatccacgtgatgcacgaggatatttttaattcgatgcacagaatataataaaaaaagccgtatatatatgagtagtgcaaaaggaaagtgaaaccggaggaataacatgattaattcccatgatatattggaaacaatcaacatgatagacaatgaaaatcttgacgtgcgcaccattacgatgggtatttccctgcttgactgtatcgacagcgatatagataccgcatgcggcaagatttacgataaaatttgcagatatgcgcaggacctcgtaaaaacgggtgaaaacatcagcaaggaatacggaatcccaatcatccataagcgtatttccgttacccccatcgccatggctgctgctgcctgccaaacacacagccccgtaaaatttgcgcacgcgctggaaaaagcggcgcagagcgtcggcgtcaatttcatcggcggctacacggcgctcgtacagaagggctttgcggcgggcgactacgcgctgattgagagcatcccgcaggcgctcgccgaaacggagcacgtctgctcctccgtaaacatcggcagcacgaaggcgggcatcaatatggacgccgtcgcgaaaatgggcagggtcgtcaaggaaacggcggagcttaccgccgaccgcgactgcatcggcgcggccaagctcgtcgtattctgcaacgcgccggaagacaacccctttatggcgggcgcgttccacgggccgggcgagccggactgcgtgattaacgtgggcgtttccgggccgggcgttgtgcgcgcggtgcttgccaaaaacccggactgcgatattacggaagtggcaaaccttatcaaacgcacggcgtttaagattacaagaaccggccagctcgttgcgcaggaggcctcgagaaggctttgcgtcccgttcggcatcgtcgatttgtccctcgcccccacgcccgccgtaggcgacagcgtagcgcatattttggaggagatgggccttgaagcgtgcggctgccacggtacgacggcggcgctcgcgctattaaacgacgcggtcaagaagggcggtacgatggcctcgtcccatgtaggcggcctgtccggcgcgtttattcccgttacggaagatgccggcatgatagccgcgtcaaggagcgggtgcctgacgctcaacaagcttgaagcaatgacggcagtctgctcagtcggcctcgacatgataaacattcccggcgacaccacgccggagattatttccgcaatcattgcggacgaagcggccattggcatggtgaattccaagacgaccgctgtaaggcttatccccgctatcggcaaaaaagcgggcgacgagctaaacttcggcggcctgctgggcggcgggccggtcatgccggtaaacaccgcttcccccgcaaaattcattgcgcgcggaggccgtattcccgctcctctgcaaagcctgaaaaattaacaaatacgacaagaatcctgtaaattatcatcaaaaatgaccactcaccgtgtaaggtttgttggtataaattaacattgtcaaatacatcaaacaggaatataataacgtttagatttttccgagaaaagggcacaatatataagtatattatttatcctatatatagggaccgtttctgaaggcgagggattccgaacctcgcctttattttatcagcttggaggtgtccgcatcatgcaggatatgatagcgaagatagttgaaatggacgaaaaggccagggagctgacggcggaagcccagcgcgaaaaggcgatgtccgagcaggacattgcaaaggccaaggaaaagatttacaacgattttatcgaacgtgcccgccgcaggattcagctcaacgaagaaacagagcgtaaaaccgccgaggaaaactggaagcaggcagaggccaggcaccaggaaacgctcaggcagcttgagcaggcgcgagtggaaaacagcgacaaatgggccgacgaaatcgttaaacgcgtactcggctgagccttttaactaatcaaacggaaagggagtgttgggcatggctttttcttacgcctcaaacgcgataacagccaaagcgagaaccatgtacggcaagcggctgacggcaaaggattacgcgagccttctttcctgctctacggttcccgaggttctctcctatctcaagagccatacgaaatacgcggcgcttttaaacagcgtgagcgaacgcgacgtgcacaggggccagctcgagctaatcctgcgccagcagcttttttatgatttcgcggcgctttgccggtacgaaatttccgcgggcgagcatttttcacagtatattatcatgcgcacgggaatcgagcagattatgcatttcctgatgctttacagctccggcagggcagaggaatacctctatgtactgccgacgtatttcgacagccacacaaccatcgatttaaaggcgctttccaaggcgcgcagctacgacgaatttttagacgcgctcggcacgcacagcaggttccgttccatattgagcggctttaagccgaaggacggccagccgctcgacatgccggccatagagaacgccctgtatacttacctgtacgaaacggtgttcgggattatcgaccagtacaccaagggaaaacagaaacaggagcttcgtcacattttcacaagccatatcgatttgacgaacttcgtgcgtatcctgaggctgaaaaagtattaccacctcgacagcgaaaaaatcaaaacgcagcttcttccctttgggacgctccgccccgcacagcttgaagcgatgtgcgccgcagaaagctcaaaggaggtctttgccatcatggaaagcacgccggcaggcaaggtgatttcaaagatggaatacaattatgccggtgaaatttccgagcggggcaaatacaacctcggcaggaggaacatacacttttcaaattatccgaccgttgtcttgatgtcctatatttttttggaagaagaagagctttccaatgtcataaatatcatcgagggcgtacgctataaggtcgaccccgatacgataaaaaatttactgatttacagttagcctgataaacggctaaaggagggtaccaaatggctgtcgctccaatcaaatccattggaatcatcgggctgatgtcggagctcgataaggtcataaaggtctgcgggcagtcgcaggtcttccatccggacgaagccacgcacttttattcggataccaaaaattttgtgcccattgcggacaaaaacccttattccgattttctgtcggagctggaggacctgctccagctggcgggcatcaagccggaatatacggaaacgcggcgctttcaggtcaatgaaactgagctgcgcgggtatttagaccgtctcgatgaggagctcggcggcctgatacgcgagcatacggtagtcgagcagcagatggagcaatgccgacggtcgcttgaggagacctcccatttctttgggatggacctcgagatggacaagattaacgcctgtaaatttatcaaggcaaacttcggccgcctgccaaaggaaagctaccagaagcttgacgcgtacagcgacaacccgttcctcgttttcttcccttgcacgtcggacgagacgcactattggggcgtttatatcgctccggtcgaaaagagcgaggatatcgaccgcattttttcggcgctttactttgagcattacgaaatttccggtatggacggcacgccggagcagcattttgaaaagctgcaaagcgagctttctgagcttgaaaagcgttatgatgaaaccacggcgctcgtggaggaatataaaaaacagcacctcgacgagctgatgcggtattattccaagctgaaagagctcgatacctgttattctataaagaaatatgtcttaaaatatcataaaagctttattcttgtcggatggattccggcggaagaagaagagcagatgctgcagaagctaaacgccgtcaacagcgtggaatgcacggtgagcgacggcaaggatgagctcaagcacattcctcccacaaagctcaggaataatttctttgcaaggccctatgagttttttgttgaaatgttcgggctgccaaactacaacgaaatcgaccccacgccatttgtggccatcacctttaccctgctgttcggcattatgttcggcgatttggggcagggcctcgtggtatcggctgcgggttacctgatgtggaagctcaaaaagatggccgtcggcaagattttgattccctgcggtatttcctcggcaatattcgggtgtgtctacggctcggtgttcggctttgaaaacgcgcttgaccccgtttaccatgcgctcggcatggagggaaagccggtcgaggtaatggaaagcgcgaccatgctcttgattatggcaatcagtatcggtgtggtgcttatctgctgcgcgatgtttttaaacatgtactccgccctgcgaaggcgcgattttgaaaacggcgtcttcgggccgaacggcgttgccggctttgtattttacgcttccctcatcgcggcggtcgtttgcgaaatcgttttacagatacacatcgcaaaccctgcatatatcttaatattgattgtcgttccgcttatcctgatgttcctgcgcgagccgcttgggcgccttatggcgggagagaaaaactggcagccggaaaaatggggcgagtactgcgtccagaatttctttgagctgttcgagatgctgttaagctatgtgaccaataccatgtccttcctgcgtgtaggcgcgttcgttctggttcacgcgggcatgatgatcgtcgtgtttacactttccgaccttgcgggcaaggtactcggcgcgccgggctacattctctttgtcgtgcttggcaacgggttgattatggcgctcgaggcactgcttgtctgcatccaggtactgaggcttgaatattatgagatgttcagccgtttctatcttggttccggcaggaaattcgagccggttcgcgtaaaaaagacagactgattcccgtatttttccgcaaaagcggctaaaataaaaatattttttacatttcggaggttttattatggcatatttacttcttttcttaccggtcgtatttcttgttggttccgtactcatggcaatgcgcgctgtccagcacgggcagaagaggaaaaaggcgctggctacccagatgattaccttcttctttacctccctgctctttgtcgccgtcccgatgggcgtatccgcggcaacggctgacccggcggcggcaggcgcagcggcggctgacggcatgaagtacctctccgcggcgctcgcgacaggccttgcaggcatcggcggcggtatcgcggttgcctccggcgcatccgcagctatcggggcgacgagcgaagacccgaagacctttggtaaggctttgattttcgttgcgctcggcgaaggtattgctctgtacggactgctcgtttccatcctgattcttttcacctgataccgataccgtatcctaacgccagaaagcaggtgcgcgctcatgcgtttttacttaatcagcgacaacgtcgacacccaggtaggcatgcgccttgccgggattgacggaatcgtcatccatgaggacaaagaggtcaggaaagcgctgaccgaggcaatggagatggaggacgtcgccgttattctgatgacggagcgcctgatgtccctgtgccccgagcttgtttacgatttaaagctcaacaggcagcgtcctctgattgtggaaattcccgaccgccacggaaacggacgtacaaaggattccattacaaaatatgtacaggaggcaatcggcgtaaagctgtagccctactgtacataggcgcggggccagtaaccgcccgcgtcccgtttaaactattcggagaggaaggtttcctatggcaaatcctaatgacaaaacaggtaactttttaaatgccatacaaaaatacgccgatgaacaaaagcataaaattgaatccgaggtggagcgcttcaagcgtgaggaactgaaaaaagccgaggacgagggactgaaggacgcctatgtcctgattcaaaaggaaatgggcgcgatgcgcatcggtatatcaagcgaaatggcaaagcgcgaggaaaaaagcaagcaggcgctctatcaaaagcgtatggaaatcgtagaggacgtctttcagaaagcgtccggtaagctgcttgcctttaccaaaacagacggctacgcgaagctgctcaaaaaaagcgcgcaggaaattgcaaggtgctttgacgagcacccctgtgtgctgcgtatccgcaaacaggacgaagccatgaaggaagaccttctctcctgcttctcctactcctgcagcgtggagtacgacgattccattaaaatcggcgggatcatcggcaactgcgaaacgctcggcattgtagccgacgagacgctcgatacaaagctcaaggaccagctcgaatggtttttgcagcactccggcctgcgggtcgtttgaccggcatattccggtatttatcttaaatcctgccgtgtccgcggcaatcggagaggattggttatatggagaatcaaaacgtaatttacggaatcaacggacccgtcgtaaccgtaaaaaagacaaaatcgttttccatgatggaaatggtttatgtcggtgaagaacggcttgtcggcgaggtcataggtattaccgaaaaatatacgaccatccaggtgtacgaggagacgacagggcttatgcccggagaccccgtgcttggcacgggcgcaccgatgaacatcacgctcggccccggcatcatcgataacatattcgacggcatcgaacgcccgctcaaggctatcgaagaaaaatccggcgcgtttatttcaagaggcgcctccgtttcttcccttgacgagagcagggagtggaaggccgacatcaaggtaaaagaaggcgaccgcctaaacggcggacagatatacgcgacccttcccgaaacggcgattatcgagcaccgcttaatggtgccgccgctaattaaaagcggcgttgtaactagcgtaaagccaaacggaacatataagcttaacgacaccatcgttactctaaaggacgacgcgggcgtaacgcacgagctgacgctctgccagaaatggcccatccggcagccgcggccggttttaaaccgtctgccggcaaacgtaccgcttattacgggccagagggtcatcgacacgctcttccccatctctaagggcggcacggctgccatccctggcggattcggaacaggcaaaaccatgacccagcaccagcttgcaaaatggtgcgacgcggatattatcgtttacgtgggctgcggcgaacgcggcaacgagatgagccaggtgctcgacgaattttcagagcttatcgacccgaagtccggccgccccatgacggacaggaccgtgctgattgcgaatacctcaaacatgccggtcgcggcgcgtgaggcttctatctataccggcattacactggcggaatattaccgcgatatgggctaccacgtcgccatcatggccgactccacctcccgctgggcggaagcgctgcgtgaaatatcgggacggcttgaggaaatgcccgccgaggaaggcttcccggcatacctgccgtcgaggctatctgaattctacgagcgcgcgggccgtgccgacgtattatgcggcagcgaaggctccgttaccattatcggcgccgtatccccgcagggcgcggacttttccgagccggtaacgcagaacaccaagcgctttacgcgctgcttctgggcgctcgataaatcgctcgcctactccaggcattatccggccatcaactggattacaagctacagcgaatacttcaccgacctcgacccatggtatatggagaacgagggacgcgattttattaaataccgcagaaaaatcaacggcatccttcaggaggaaaaccgtttgatggaaatcgtaaagctcatcggcgcagacgttcttcccgacgaccagaagctggtcatcgagacggcgcgcgtcatacgcgtgggcttcctgcagcagaacgcttttcatgcggacgatacgttcgtaccgcttgaaaagcagaagctgatgatgaaaacgattctgtacctccacaaacgcgcaaaacagctgatttccgcctcgattccgatttcccgcattatggagctcggcctgttcgacaagctcaccaagatgaaatatgatattccgaactccaaacccgaaatgtttgaagactatatcagggaaatcgacgaggctctgacgaggctcgcgcagaaccaataaaattctccagcgaaagaagggtaccgccatgattatagattatgttggcgtgaaggaaataaacggctcgctgattgtgattgacggcgtcaagggcgcctcttttgaagaaatcgtcgatatccgcctggacgacggcacgacgcgccagggaagaatcgtccagatggaaggagaaagggtcgtcgtccaggtatttgaagggacgcggtccatctccctggaaaacacaaggacacggctcaccggccacccgatggaaatgccgctttcgcctgaaatcatcggaagggtgttcgacggcgcgggcaaaccgatagacgggctgggagaaatcttccccgacaaacgcatgaacatcaacggaacgccaatcaatcccgtatctagagtctatccccgaaattacatcaataccggcatttcgtccatcgacgtactgatgaccctcatcaggggccagaagctgccgattttttccggctccggtatgaagcataacgagcttgccgttcagattgtacgccaggcaaaaatcgcggacgaggccggccagggcttctgtgtcgtattcgccgccatgggcgttaaaaacgacgtcgcggaatatttccgcaggagctttgaggaatcgggtgttctgcaaagggtcgtcatgttcttaaacctttcaaacgacccgattattgaaagaacgcttaccccccgctgcgcgctgacaacggcggaataccttgcgtttgagcttaacatgcacgtgctcgtcatcatgaccgatatgacgtcctatgccgaagcgctgcgtgagttcagctcctccaagggcgaaattccgggcaggaagggctatccgggctacctttattccgaccttgcctccctttatgagcgcgcgggcatgataaaaggcaaaagcggcagcgttacgcagattccaatccttacgatgcccaacgacgatatcacccatcctgtgccggaccttacgggctacatcacggaaggacaaatcgtcctggaccgcgccttgcaggggcaggggctttacccgcctgtagacgtgcttccgtccctttcccgtttgatgaaggacggcatcggcgagggctttacgagggaagaccacagcccgcttgcaaaccagctgtttgcatcgtacgcgaaggtcatcgacgcccgttcccttgcctctgttatcggtgaagaggagctgtcccctatcgacaaaaaatatatcgagtttggtaagctttttgaatctgttttcgtaaaccagggctttaccgacaaccgttccatcgagcagagcctggagcttggctggaagcttttaggaacgcttccacgcgcggagctcgaccgtgtagacgacgcgatactcgataaatactacaaagaaacgaccaaagaggatatcgtcgcgtaatcctgtcctctttttctgctgatacactctgataaaggcggtggtccttgtggctgtgcaggcagtgccgaccaaaggtaatctcatcaacacaaaaaaatcgttgtcccttgcaaagcttggctttgagctcctggacaaaaagcgtaatatcctcatccgggaaatgatgtcgctgatagaccatgcaaacgccatccaggataaaatcgacaacgcatacagcgaggcatacatcgctttgcagcgcgcaaacattacgctcggcttttgctcagagcttgcaaacagcgtgccggtcgaggaatccctaaagctttcctaccgcagcgtcatgggcgttgaaatcccgattctgtctatccagaacgaggatacgccagagctgcactatgggctatattccacgaactccacgctcgacgacgcttacctcaagttcaatgaggttaaggttttgaccgcggagctcgccgaagtggaaaacagcgtctaccgtctggcggattcaattaaaaagacgcagaagcgcgcgaacgccttgaaaaatattatgattccccgttttgaagaaacagtaaaattcattaccgacgcgctcgatgaaaaggacagggaggaattctcccgcttaaaggtcatcaagcggcaaaagcaaagcagcgaggcggacggggacgaataatccgcggcgtgtccaaaaaacaaatctgtacggcacatgtctgtacaaattacgaacttaagctattcgcaccaggttatataaccgtacggcacgcatttatgcgcgccgttttcgtttctatatggagaaggaaataaatggaacaggataagattataccggacgcatgcccgtgcaaaaagaaagactgcgaacgccatggggattgcgagcggtgccttgcgcatcatgcaatccataaaaagcacccgccctattgcaagcgtcccggcaggaacagcaaaaggacaaggaaaaatgaaaattcttgagacacagcggttaatcctgcggaagctgacgcaggacgattacggcggcctgtgcaatatattgcaggataaggaagccatgtacgcctacgagcacgccttttccgacgcagaagtacaggactggcttataaaccagcagcgccgttataaagaggatggcttcggcctgtacgcagtactgctcaaggaaacaggcaggttcatcgggcaggcgggcattactatgcagaaaacgccggatgaaaccgtgccggaaatcggctacctttttcaaaaggcgtactggcaccggggtttcgcaacagaggccgccatagcccttcgggattatgcgtttgaaacgctccatatggagcgcatctactctattatacgcgataccaatacggcctcccgcagggttgcacagcgcaacgggatgaagcccgtggggagctttgtaaagcattattacggaaacgacatgccgcacgtcgtttattgcgtaaaaagggaagattttcccatgaagggcttgcaaaaaaagctttgaccttttataataggctttgttcaactcaatacgcttgggtgtctttgtcgccggataaagcgccccttaaaaagcgccggaaatttataccgtcaggtcttcgggtataaatggaaccggcgcttttaaaatagtagaaaggaattttcttcagggactgcttatatggatacaaacaagcttctaacaggcaacatttataaaccgttcgcgaaatacgtgtcgctcaacattttaagcatgatagggctgtcgtgctatatcctcgccgataccttctttatcgcaaacggggttggcgcgcagggcctgacggctttaaaccttgtgctgcccgccttttcactgctgaccggaacgggaatgctcctgggtatgggcgcggcgacgcgctttgccatcctgaagggcgaagggcagcgggaaaaggcaaacacaatgtttacctgcgcgatggcggcgggcgcggtactgggcattctatacaccatacttggcgttgtgttctctgaagggatttcccgcctgctcggcgcgcagggtgaaatcctttcaatttcggctgagtacctgcgcacgctgatggtttattcctgcgcgttcgttctcaataatgtgctgatttgctttgtccgcaacgaccacgcgcccaaccttgcgatggccgcgatgattaccgccagcctttctaacgtcgtgctcgactacgtgtttattttccccttgggtatgggaatgttcggtgcggcgcttgcgacgggcattgctccaatcatcagcatcgcggtgctgtctttgcactttgcccgcggaaaaaattcgttccgcctgcaaaaatgcaggcccgattttaaaagcatcggtactattttttcgctcggcttcccctccttcgtcatggagatgtccaacggtatagtgattattatcctgaacttcgtgatactaggcatcagcggaaacatgggcgtcgccgcctatggaatcgtcgcaaacctcgcgcttgtcgccgtgtcggtctttaccggggaggcgcagggcatccagccgattatcagctacaattacggcgcggggaacgtgcgtaatattaaaaaaacctaccgccttgcgctcattacggcgctgtgcctcggcgttttgctgtatttaagcggcgtcctgtttacagaccaaattgtgtctgtcttcaaccgggacaacgacccgcagcttttatcgcttgcaagccgcggcgtacagctttactttaccgtatttttgattatgggaatcaacatcgtaaccgtgtcgttcttttcctcgaccgccaggcccgtgcagtcttttgtgctttccatcctgcgcggctttgcggcggtcattccgtttgcggcggccctccccgcctttttcgggctggacggcgcatggctgtgtattccggcggctgaggccgtcacgctcctgctaagcgttgtcctggtaaaaaaatcacatttgaaagcgccggccgttcaggcggaaacggtatcataagagaaagaaggggtttactatgatgtatgtctggctgattttaggctttgtcctgctgattaagggcgcagacctgtttgtagacggcagttcctctgtcgcgcgtatttttaaggttcctgccgtcatcatcggccttactatcgtcgctatggggacaagcgcgccggaaaccgcagtgagcatctcggcggcggtgcggggccaaaacgaaattgccctgagcaacgtcatcggctccaatattttcaacctgcttgtcgtggtcggcatatgcgcggccatcaagccggtcgtccccgcaaaggaaatcatcaggcgcgatttgccgatttccctgctgtgcgccgtactgctgctcgtagccagcctgaaccttgcgctcggcaggatagaaggcatcgttttgcttttggggtttgtcatctatatcggatatttggtttataccgcaagaaaaaaaccggctgcggatacagaagaaaacgttaaaaaaatgagcccgctcaaaagcgcgctctttatcctgattggcatagcgggaatcgtgctcggcggccagctcgtcgtaaacagcgcgtcggacatcgccgcgtcctttgggctgagccagacgctcatcgggcttacgattgtcgcggtaggcacgtccctgccggagcttgtgacctcgattgtcgcctcgcgcaaaggggaaaacgggcttgcgctcggcaacgccatcggctcgaatatcttcaacatcctgctcgtgatggggctttcgaccgtaatctcccccatcggggtcaatatgcagtctgtttgggatttggtcgtgctgattgcaatgagcgcggtcatactcgtttacctgctcatacgtaaaaagctggacaggccgttcggcctcctgatggtgctgacgtatatcggatatatggcgtatattatccagagatagcgcggggaaaagggttgacaaaaccattctgccgcgttatgataaaacaaataaaatagaatggagtggaaaaatgcgtattttttcttgctgaattgaatttgcacgataaaacgggaaggcggacgaccgcctgttttgtcatgcagtaagcaggaaagttaccggattttttcgctcttcagatacgcccgcgccgtattgggcgctttttgtcgtatgctgtgagccgtaggaatttactttcctgcggctatttttatgcgacaggaggcggatttttatgtctttaatcaatgtatcaaacttaacctttgcctacgaagggagctacgacaatatttttgaggaggtatccttccaaatcgacaccgcatggaagctcggctttaccgggcgcaacgggcgcgggaaaactacctttttaaagctcctgctcgggcagtacgaatacagcgggacgatttcttccagcgtctcgtttgagtatttcccctatgaggttcccgacccttcgcagcttacctgcgacgttcttggttctatcaatccggactgcatgcagtgggagctgctgcgggagctttcgcgccttgaggtggacgaggacgtgctataccggccgtttgagacgctttccaacggcgaacagacaaaggtgctgctggctgcgctttttctcagggaaaacagctttctgcttatcgacgaaccgaccaaccatctcgatttgcgcgcccgcaggcttgtaggcgactaccttcgcacaaaaagcgggtttttgctcgtttcacacgacagggcgttcctcgaccggtgtattgaccatatcctttccattaacaaaatggacatcgaaatacaaaagggcaatttttcaacatggtatgaaaataaaaggcggcaggatgaatttgagctaacaaaaaacgaaaggcttaaaaaagacatcaggcggctggagcaggcggcaaaacgcgccggcgcgtggtctgaaaagacggaaaaaagcaagtacggggaagatgcggatgacaagggacatatcgggcacatggccgcgaaaatgatgaagcgttccaaggcaatcgagtccaggcagcaaaacgcattggaagaaaaatcaaagctgctcaaaaacattgagtcgtcggacagcctgaaaatcatgcctctccccttccacagcagccggctgctttccctgcgcggcgtttccattgcttacggggaaaagcaggtatgcggcgaaatcagctttacgctggaccggggcgaacgcattgcaatcaccggtaaaaacggcgcgggcaagtcgagcatattaaagcttgccgccggctttgatgttccttacaacgggatattggaacggccgcaggggctgattgtctcttatgtggcacaggatacctcttttctcagcgggaagctctcagattttgcgcgggagcaggcaatcgacgaaagcctgtttaaggcaatccttcgcaagctcgatttttcacgcgtacagtttgagaaggatatgcaggcatacagcggcggccaaaagaaaaaggtgctgctctcagcaagcctctgcaagcgtgcgcacttgtatatttgggatgagcctttcaattttatcgacgttttttcccgtatgcagatagaacagctgctcctgtcgtgcggcgcgtccatgctctttgtcgagcacgaccaggcgtttacggaaaaaattgcggcgaaacaggttcatctgccataggacgccgtgttaacggtgattcgcattattatgaatggaggaaaacccatggaaataagagaagttacaggcaaggaggatttactggaaatcctaaacctgctcgacggccttcatatcaggtattggatagaagggggctggggcgtcgatattttgctcggaaaacagaaccgcgagcacagggatgtggatatcggttttgacgcggactttacggagcccctgctggccgcactgaaggataaaggctatgcggttacaacagactggagcccgacccgcatagagctgtgccacccgaaaggctgcgtcgtcgatatccatccgatggaaattgaggaggacggaagcgccaggctggccgacttaaacggcggctggtatcattttgagcccgggtggtttacctccgccatatatgagggcagggctgtcccctgtatttcagcgccagcgcaaaggctgttccactgcggctatgaattaagggaaaaggatattacagacatgcgcaacctcagggaaaagtttccggactgctttgagcagcccgaataacgacgattcatatagacgattcatataataaaggcgtgcccgcggcataaaaaccgaaggcacgcctttttatctttcatgaaatgacgcttgagcttacttgagctttcagcctgacaattttaattcaaaaaaagacggcgcaggatgaagtacgccgcccgccaaagcttaaaaaatattctatgccgcgcattttatgcaaaatcgcgcagggcttcaaaataaaccgtttcatccataatcctgcgcgccgcctcttcccccgcgtttgccgcgaggcagagctttgcatacgccgcctcgggcgagatgttgaaaagcggtattacatcaagcgccagcagctcctttgccgttgcgtagtttgtctggatacccgagcccttaaatgacgcggcgcagacaggtatattttgtgaacggcacctttctgttaaatcaaggacattgctttccccctgtgcggtgcaggcggtcgcgctgtggtaaaggtacaaaagcaccgcgcggtacttttccagttgaaacgccgtataatcgattcccgggtactggcggataagcagcaccttcttttgcagctgaacctcttcaaatagcttttcaaatttatggttaagctcccgtggggaagggtttacgggcgaaagcacaggaaagaacacgccgtgcgccatcctcccgagcggttcgcctccgaaggagccgtattcgtcccggtacgggtcggattcgcacaggcgcgtcgcaagatatacaacggcctctccctttgtattctcatagattacaaagacgcctttgattctgcatgtaataaaatcgaccgcgcttttcaggttacgtaatccgttgctccggctgtcggcaagcgtgtaatttgccgccgtcaaaacgattggtataggagtatggcgcattaccataccgacaagcgccgccgtataggaaagcgtatcggagccgtgcgttataaccataccgtcgtattcggaaagcggcagggataaaagcgtattgcaaagggtattccactggtcaaaaccgatattttcacttaaaatattgagaggctggaccgtctcaaattgtatatcttcgccgtattccctacggtaatattccagcagatgacaggagccggattttaaaacatcaacggtattaccctcctgcgcgctgccaatcgtgccgcctgtataaacggctaggattttcttcataggctttccccttatcctaaatttctctgtatctatcataccccaattatttcgataacgttcctgtttgctgttaaaaattcttctttattgtagcgcccgattttttgttcgtcaatccccggcatgaaaaggccccgcggtgtaacgcagggccttttaaaaaaccatatttaaaaattattttttgttgtctcttaaacaggccaaaacctctttttctgtttttagctccatgacccgctgcgcgagagcatccgcgtcctttttgctccacagggaaattgcttttcttgtggacagaacggcggtggggctgacgctgtattcatccagcccaaaggaaatcagcagcggaataagcagcgcgtccgcggcggcttccccgcacataccgaccggtacaccctcctgtttgccgcattcgattattctttttatagagcggagcaccgcgggattataatgggaatagaggtaagaaacgcttgcgtttcccctgtccacgcacatggtatactgcgtcaaatcgttcgtgccgatactgaaaaaatccgcttcctttgcaagcaaatctgcaatggcagccgaagccgaggtttccatcatcacgcctattttaatgccggggtcatattttttctgttctgagtccagctcttccatgcattcttttataagcgctttcacctctgtaacctcttccacgcaggtgacgagcggaatcataatcctcacgtctccaaaggcgcttgcgcgcagcagggcgcgcagctgcggtttataaacatccggccttttcaggcagaatcgcaccgcgcggaagcccaaaaacgggttttcttccttttgcaggccgaggtacggaatttccttgtcgccgccgatgtcgagcgtgcggatgataaccggcctgcccttcatgataagcgcggcctttttgtatgcctcgagctgctcctcctcgcttggaagggaagccttatccatgaataaaaattctgtacggaacagccccacgccctccgcgtcacagtcgagcgccttctgcgcgtcctcggggttaccgatgttcgccacaagctcaacgcgcctgccgtccgccgttttggtgtccctgccgataaacctgccaagcgctttgcgctccttgatgaactcgtcgcgcagccttgtatattctgttacctgttcaagctccgggtcggggataacgctccccactgcgccgtctataataaccgcctgcttgtcggcaagcacctgcaccgcgttttccacactgagcaccgccgggatttcaagcgcgcgggcaaggattgccgaatgcgatgttttggagcccatctcggtaataatgccgacgacgttttccttacgtatacccgccgtcatggagggagtaagctccttaacaacaagcacggtgttcggcggcgcgtcggaaatatcggtttcctcaagccccagcaggatacgcagaatgccttccttcacgtcccgcacgtcggcagcgcgctggtttgtcaaatcgtcttccgctgaggaaaacacattgataaacatatcgcagatggcttcgagcgcgctttcggcgcactggccgccctcgatgagcttttcaatttctccggccatgtaggggtcctgtatcatcagcacatgtcccctgaggatttccgcctctttttccccgacgttctgttcaattttgtctgccttcgccctggcagcggtacaaaagccttcaattgcttcgcgcaggcgtccaagctccgcctgtacgtcttctatttgtcttggcgtgtagcttaaattatgctcccgaattaggaacacccgtccgatgccgattccgggggacgcgcctatcccctttaacataacgctcacctctttacctgccgccgtttattcaccgagccccgattcaatcagcttcacagcctcgtcgagcgcctgctgctcgtctgcgccgctgcattcgatttccacctcgctgccgcacttgatgcacgcggcaataatattcatcaggctttttccattcaccttgtttccattgtggataatccacacgtcgctctggtacttgcccatcgcgttagcgaacacgcccgcagggcgcatgtggaagccggaaccgttcgtcagtgtaatctttttcgttaccataataaagactcctttggtttataaatttatatctaagcggttattttgcccttttctgctttttttcaactgtgtattttggctttttgagaatggcaagcataaacatgccgacgaccgcgcccacaaggattgaaagcgcataccagccgatgttgcccataaccggcaggacgaagatgccgccgtgaggagccataagcgtacagccgaacgccatcgacatgccgcccgcgaccgcggagccgacaatgcacgcgggaatgacgcgcagcgggtcggacgcggcgtaagggattgcgccctccgtaataaagcaaaggcccataatatagttgactacgccagatttacgctcgttttccgagaacctgtttttaaagaaggtagtcgcaagcgctatggcgagcgggggaatcatgccgcctatcataacggcagccatgatttcgtaggagctgttgatggttgcctgcgacgcggcgtccgcctgcccaatgagcgccgccgcctgggtaagggagcctgtgccgaacaggtaggccgccttgttgaaggggccgcccatatcgattgccatcatgccgcccaaaatgcagccaagcagaattttactgccgccgctcagggacgcgagcaggttattgagccctgtgtttatccagcccataatcgggttgaccgcgcacatgaccacggcgataatcagaagccccaaaaccgggtaaatcaaaaccggcttgatgccctcgagcgccttgggcagatggtcgcagagcttacgcaggccgagcatcaggtagccgccgacaaaaccggcaaatagcgcgcccaaaaagccggacgggatatctccgccgggcgccataaaggtggagccgagcgcggcaagcgaaccgccgacaaagccgacgagaagacccggcctgtctgcaatactcatggcgatatagcccgcaaggattggcagcataaagttgaacgcgtagccgcctatcgatttaaagaaagccgccaccggagtggtggagccgaagttcgcgccggcgggagcgcccatgattgtatcaatcaaaaacgcgaccgcaatcaggataccgccgccgataacaaacggaagcatatgggaaacgccgttcatcaggtgtttataaatggtatggccaaagccttctttttcctctttagaggatacttccgcctttccgccttccgcgtgataaacgggaacatctccttcaagcacgcgctttataagctcttccggcttatggataccgtccgcgacctttgtttttaaaacccttttcccgttgaagcgggccatttccacatttttgtcagccgcgatgataatgccgtcgcactcgttgatttcctttgcggtcaggatattcttcgcgccgccggagccgtccgtttccgcctttagggcgacgcccatctcctgcgccttctgctcgagcgcttccgcagccatatacgtgtgcgcaatcccggtggggcatgccgttaccgcgagcaccctgtatccgctctttgcaggagcaggctgcgcttttgcctcttccccgaacttttccgtctcttttttatcgatgacggaaaggaacgcttcctttgatttcgccgaaagcaaatcccccctgaagccctcgtccatcagtaaaatagtcaggcgcgataaaacctcgagatgtaaatcgccgtcgggcggggccgcaatcatgaataccaggtttgacggcttgccgtccatcgattcgtaatccacgccgcccggcacggtaattgcggcaaggcccggccgcctgaccgcgtcgctctttgcgtgcgggattgcaatgccgtcgccgattgccgtggtgccgcccgcctccctgtcgagtatgccctgcctgtacttttgtgtgtccttgatgttgccggccttctcgtgcaaagacacgagcaaatcaatcgtttcgcgttttgagcctacctttgcattcagtaggattgcttctttttgaagtaaatctgttatacgcatcggttcttcctctccttcataatgttttatatacgtttataatttcttcttttgtagcaagcccctgggaaaaagcggtggcgcttcccgccgccgttcccgttttcaaggccgtttcaaagctcccgctttccatatagcccgcaaggaaccccgccaccatggaatctcccgcgccgactgagttctttaccctgccgcttgggacgcccatcttatggcagccgccctgttccgtcacgaggaccgccccatcgcccgccatggagacgagcacgttgcgcgcgcctaaatctttgagcctgtttgcgtacaggataatttcctcatcgctttcaagcactttcccgaacatctcgccaagctctttgttattgggcttgattaaaaacggcctgtatttgagcacatttaaaagcaaatcctttgtcgcgtccactacgaacagaatctccctgtcctgcaagcgtccgagtattttctcgtaaatgtcctcaggaagcgttttcgggatacttcccgcaagcacgaggatatcgcccttctccaaatggtcaagctttccaaaaagcgcttcgacgtccttctgcccgatttccgggccctgcccgttgatttccgtttcaatgcccgattttattttaacgttaatcctcgaaaagccggcgggcagcctgataaagtcggtctggattccaagcgcactgacgccccgttcaatcgcttcacccgtaaaccccgcgataaaaccgagcgctttgttttctaccccaaggtttgtcaggattgtggaaacattaatccccttcccgccgtaatagatttcttcccgcgtggtccggttcacctcgcccggcaggaatgaatccatatggacaatatagtcgagcgccgggttgaacgttaccgtataaaccaatctttacacctcctttatcaccgcaatgtcatggtatttagtatcgggaacgctgtccgtaactatgcacgcctgcgacaaatccgcataggtaacggacgagaccattccgaatttactgctgtccgccagtacataggcaacaaagcttcttcccatcgcttccgttttgataaacgcttcctcgatatcaggcgtgctgtagccggcttctgctgaaataccgttggttcccataaaacattttgtaaaattgtattttttaagattgttgactgcctccgcgccgacgaccgcctctgtcgaaagctttagctgtccgccgataataaaagcgcgaaggccgcgggaaatcagctttttcgcgtgaacaattccatttgtgacgaaggtcgcgcgggtgttcgggaggaactcaatcattttttccgtcgttgttcccgcgtcgatatagacaaaatcctcgtcgttgacggtggaagccgcgtaccgggcaatccgttccttctgctccacatacagcctcgattttgtagagacgtcctcttccaacgccgcgaagctccggtcgagcagcgttgcgccgccgtgtacctttttgagcctgcccatctcgtgcagggcattcaaatcgcgccggattgtcgattccgaggtgtcgagggccgccgtcagctccgagacggttaccgtctttttttcctccaggattttcaggatttctgcaaacctttcttccgataacacgggcaatccctccttgttgactccatcatatcaccacaatcaatcaaagtcaagcattttcaatcaataaaaatcaaaaaaaatcattcatattcaaaatttaccgaaataccaatcaaattcggtcaagcatgactggttccataataaaaagcctgtccaaaacagacaggctttttcatttatatttttaatgccagaattcaaaggttctcgccagggaaagcaaaagctccctcccggttccgttttttgaaagcgcaatgaactgatattcaaatacaaacgcaaaattgacgacaacgcaaagaaggaacgagccggttaaaacccgtgacaaaatccgtttgacgccggcatttttcgtattcaggtaaattgtaaacgcaatcgcgaatgcgccgagcagcagctgccaggaaaagtctgtgcaataccgcacgccatatccgctttcccatattgaaatgattataatcagcggggcggccacgcagctgagcaaaaggagcagcgccgctttgcgccttttttcctttggcatgcagcgatacgccctgaaagcaaagaaataagaaaacattggcagggccctgaaaaacaggccgattgccgtttgattggcgataaagtaatacccgtttaaatcaagcgtactgaaggcggaatggacaaatggaaacgcagtatttacacttgggaaagcaagcaggaaattgtaaagcccaattgcggccaggtgcgtgtggtattgggaacgcgtaaaatcgttgatggtaagggaataatctatcccgaaatccataaacgagccgaaccgcgcatagttgtaaagcatttgcgcgccgccaattaccagaaacggtatggccgcacaaagaatatatacgccgtaacgcctgaaaaagccgtctctggcttttccttgttttatttgctcttgcgtttgcctgcgcagcttttggaatccggcaatcaggaaagcaaccgccgcaatgcaataaacggcaagcgtcgggcggcataaaacggcaagcgacaataaaacgcctgagagcgctacacgccatcgtcggattttcccgtcgccgacaatattcgacgaaagcaggaaaaacgagcccgcagtaacgcaggcaaagccggaggtctgggcaatctcataaaaattgggcgtaatgaaattaaaccataccccgcaggatacaagcgccataatgagcgccatcaatacaaacgacgacggcacatcccgaaaaaacctgtcgaaaaaggccattaccgttttcatcaggaaaaataagccgattgcgccaaataggaaaacggcccacacggtcggaaagtaaaagcctgtcagcagatgataaggcaaaaacagcaaaactacaggcgcgattccataataagaatagtaattcccttcataatatacatgatcccatgcgtaggctgcacccgattcaatcctctggctccaatcatacggattttccagcgcttttaacccttcgcttggctttacgtcgagcgtaacgctgcccttctcaaaagcgtccaccagctcctgcgtaatctggttccctgttttcgatgtaaattcctgttcaagcgtaacaccgctgtccacacggtacagctgagtcattccgagtgccgcaaagaccataaaaagcgcgattacaagggcagcgcccttacatacagtttgattgtccttatatttctttttcatctgcgcgctgctgtagaacagatatacaagcatggctgccccaaataccgaaaagaaccgcataaatgaaaattcaaacggaaccggctcgtttagaacaatcgccttaaccgtaatagattcttcttttccagccgaaaaatcaaaccttaatttggagacgttcccggaataattgcaggtaagtacgctgcttttttcatttccgcgaataatctccgcctcttttattccggtccggtaggccctgtttgtttcgtccgcataatttacagaaacctttaccgccgcgtttgttgttgactgcgcctctatttttaccgttcccaccggcataccgacctgcgggaattctatggacgcgcctccagcctgcaccgtacggtatccgtccgcagacttcgtaaaatttgtaaaagcagcataatcaagcgtgaggtccgcacgctgataatcagcagagagcaagtggtatgcattaaaattaaacacacacagctcaagcataaccgttaggacggcagcacgcgaggcaaaccgtaatacgcgccgcaagcgctgcgttataatcgttgttttcgaaaaaagcgccagtaaaaagaaaaccaagccgcatatcaggcaggccgccggcaagtttttgactcggaagggaagccccgtctgcacggcgctcagcatcatggcgcaggcaagcagaacaatacaggctgcagcacaatagaaaatgcccttcttatgcttttcataaaaggaaaactctttttttgaagtttcaaaaaataaaaaagcacctaagaatcccgtcaaaaccactgataacaaatccattgaccaaatcataatttttcccatccccattttgtaaaaagaaagctataaaaaatgtatcattttctgaaacaaatgtcaattacaacaaaaaaaaggacgcgttccgcatccttttaaccacgcttatttacggccgcaccgctcacagcacccgccgcaggatttacagccttttttcttcttttttaccgttttatataccatcagccccacaaagaaaacggcaagggccgctatgatgatgtcggcagccataacgccgcctccttcctgctgattaaaatatatgtccgaaaagagtcccggcctggaacaccaatgccgaagcaaaccatgccacagccagctggtagcctatggagattgccgtccactttgcgctgcccatttccttgcggatggcggagagcgccgcgatgcacggcgtatagagcaaaacgaataccataaaggaaaaagcggacagcggcgtaaatacctcggaaaccgccgcggccgaaccgccgtaaagcaccgccatggtgctgacgaccgattcctttgctacaagccccgtcaccagggaaacggacgccttccagttgccgaagccgcacaaggtaaagatgggggcaatcgcaataccaatggacgcgagcatgctctgcgagctgtccgaaaccatctgcatggaaaagtcaaacgactgtaaaaaccagattaatatagacgcgcccatcaaaacggtgcccgcacggacgaggaaatccttgagccgttcccatacgtgcagccacaggcttttgggcgacggcaggcggtagggcggcagctccatgacaaacggcgcgtttttcccttttaatatcgtatttttaaagagcagcgccgtgagcacggctatgaccatgccgagcagataaatcgcaaagataataagcgggctgttttttgggaaaaaagccgaaataaacaaaaggtagaccggcattttcgcactgcaggacataaacggcgtaatcataatcgtaagccttttgtccttttcgttttcgagcgtgcgtgtgccgagcacagcggggaccgtacagccaaagcccatcagcattgggacgaaagccttaccggaaagcccaatcatacgcagcagcttatccataataaaggcggcgcgcgccatatagccgctgtcctccaatatagacagcagcgtgaacagcagcataatctgcggcaggaaggatacgacagcgcccacgcccgcaattacgccgtccaccaccaggctgtgcgcccatagggacgcgcccgccgaagtaagcagcccatctataaagcccgagaagacgtcggttatcaggtattccgccccgtctttcaaaaaggtaccgagcggaccgaacgtaacgaagaacacgaacagcatcatcaaaaggaaaagcgggagcgccaggaccttatttgtgaccacgcggtcgattttatccgacagcgtgacaaagccctgggggtgctttttatgcaccgccttttcacatgccgcgcaaatgtatttgtatcgctcgtcggcaataatcatttctcggtcgatatatttcgtcgtttcaatttcattaatatggaactcgatgtggtcacgctgctgtttggtaaactggtactgtttccatgttaccttgtcgccctcaaacagctttaccgccgtccagcgccggtgctccggcctgctctgctctacctcttcaagcgcctcttctatatctcgcagcactgcgtccacacgcctggaatatgtattttttacgggtacgaaatcgtagcgccctgcaagctccaccgccttctccaccagctcgcccacgcctcttcccttgcttgcggaaattgggacgacgggcaggcccagctcatgtgaaagcagggcgtagtcgattctgtcgccctccttttccagaacgtccaccatattcagggcaattaccacgggctttcccagctccgcaatctgtgtggtgagatacaggttgcgctcgatgttcgtcgcgtccacaatatcgatgataacgtcggggtcatccttcagcaggcagtttcgcgtgacgatttcctccggcgtatagggcgaaagcgagtatattcccggcaagtcgattacgctgatatccctgccggggaaccttaccttgccctcctttttctctacggtaacgcccggccaattgccgacgtattggcttgaaccggtcagctcgttgaaaagcgtcgtcttgccgcagttcggattgccggcgagcgccatttttattgtttttttctcctctttgactgctttttgcattacagcctgcgccatctgtgcaccctctttaccttaacttctcaactgtaatttcctttgcctccgagcgccggatgctcagctcgtacccgcgtacatttatttcaatcgggtcgcccagcggcgccgttttacgcataatgacgaccgcgcccggcgtaatgcccatatcgataatccttctgcgcagcgcgcccttgcagccgatgctcacaaccgtggccttttccccgattttcagttcatttaccgtattcatcctaaggcccccaaataaaaagttagatttttctaaccaaaaccaacaaaaaagttagcaattgctaacttaataagaataccacatacgcggtatcttgtcaatgcgcggcgccttggcccgccctttcaagaactatgtaataatgccctttcataatatgaaatgcttgtacaaaatattcgtttctcaaaagcgcagggccgcggaacattctcttacagttttcacaaaataattccgtttcatcttgcaaaattacagcgaatcgtggtatcatgatggagtatattagtccaataaaccagtctggaggcttttgatatgattgtaagcgatattatcaaaattttagacgccgacgtaattctcgaaggcgacctgaacgccgaaataaaaacggcgtgcggcagcgacatgatgagcgacgtactcgcctttgtaaaggaccaatccgtattgctgaccggccttgtgaatccccaggtcgtgcgtacagccgatatgatggatatggtctgtattgtttttgtccggggaaaaatgccggaccagacgattatcggcctggccaaagccaggggcatcacgcttttgaaaacgcgcctgcggatgtttaccgcctgcggcctgttatattcgggcggattgcggggaggctgtgaaaacgatgagtgtgattaacctgaccttcgacgtaccgggcgacgacttcacccgcgcgggcgaggcctcaggcgcggtcaagcataagcttcggaagctcggctacaattccgacgccatcaggcgcatggcaatcgccatgtacgaggcggaaatcaatatggtcatccacgcgggcggcggacagattgacgttgaaattcaccccgaccgcgtcaacgcaaagctcgtagaccatggtcccggcatacccgacgtggaaaaggcgatgcaggagggctactccaccgcgcccgacaatgtgcgaaacctgggcttcggcgctggcatggggcttcccaatatcaaaaaatacgcggacgaaatgaaaatagacaccaaaatcggagaaggtaccaccatgtatctttccgtgcatgtcaacaaggcataattcaatcgattacagaaaccgggagggattcggccatgtccgaatactatcactccgttacgctcgacaaagacaagtgctgcggatgcaccaactgcatcaagcgctgtccaacggaggcaatcagggtgcgcgacggaaaggcaaggattatttccgagcgctgtatcgactgcggcgagtgcatccgggtttgcccgcaccacgcaaaacgcgcgcagtccgcggagctttcggagcttcaaagctgggaatacaccattgccctgcccgcacccgcactttttggacaattcaataacctcgacgatatcgatatcgtgttaagcggcttacataaaataggctttgacagtgtgtatgaggtttcgcgcggcgcagagcttgtctcggaagcgacgcgccacctgatgcagtccggcaagctcaaaaagccggtcatcagttcggcctgcccggcgattgtgcgcctgattaagctgcgctttcccgatttaatcgacaacgtcctgcccctgaacgccccgatggaggtcgcggctatgtgcgccaaaaagcaggcggcaaaggaaacagggcttccgctcggaaaaatcggcgtattctttattacgccgtgtcccgcgaaggtaacggacgtaaagaattcgattgggagggacaaatcctgggtggacggcgcaatcgcagtcagccgtgtataccccgtattgacggaagcgatggacaaattaaagcctgaggaaattaccgtcggcgcgaactgcggcatcatcggcgtgagctgggcgaccagcggcggggaggccgccgcgacgctcaacgacaaataccttgccgcggatgggatagaaaacgttacccgcgtgctcgacgagcttgaggacgagcgaatcggggatttggaattcgtggagttaaacgcctgctccggcggatgcgtcggcggcgtgctcaatgtggaaaacgcgtatgtcgcgcaggcgcgcatccaaaagctgcgccggtatctgcccgtttcacagaaccatctcactccccagggtgaggacggcgtaccggaggatatgcgctggacaaacaagcttgaatactcgaacgtcttgaatttaagcgacgatttggagcaggccatgcagatgatgacgcagatggacgaaatccgctcccatctgccgaacctcgactgcggaagctgcggcgcgccctcgtgccgcgccatggcggaggatgtggtcaaggggcttgccaaggaaactgactgcatctttgttttaagggaaaaggtcaaaaacgttgcggacaccctttccctgatgggcggctatacgcctcctatgagctcagactaaaattttttgattcctttttacacgggaggttttcaaaatgaccgtagaacaactggcagaacagctggatattaaaatttacgcgggaaaggacggagcaagccggcaggtgcgcggctgctatatcggcgaccttctaagctgggtgatggggcgcgcgcatgaggatgacgcgtggctcaccgtaatgggaaacataaacgccatcgccgtcgcgacgctcgcagatacctcgtgcattatcctgacggaaaacgcgccgctcgatttggaagcgaaggaaaaggccgacgagcaggatatccccgtcctggtaacggaggataacagctacgacaccgctgttaaaatttacaatctgctcaaggcagagcagctatgaaggctttttacgatttacacctgcattcctgcctttctccctgcggcgaccgcgacatgacgccgaacaatatcgcaggaatggcaaagctctgcgggcttcaaatcatcgcgctgaccgaccataacacctgtaagaactgccgcgcgctgatggacgcatgcaggcaatatggaatctgcgccgtaccagggatggagctgtgcaccgcggaggaaatccacgtcgtctgcctgttccccaccctgcaaagcgcactctctttcgacgaggcggtctatccgcaccttatggacattaaaaacaggccggatatttacgggcagcagctcatgctcgatgaaaacgacgagccggcgggcgttgaggataagctgctgattacggcggcggacattccgctttacgggctgtcccattttgtcggcagcttcgggggaacctgttttcccgcgcacatcgaccgcgacagctacagcgttctttccgtactgggtgaaatcccgccggaggagcggtttaccgcggtggaaattacggcgggcggcgatataggcgccctgaaaaagcagcatcccgccctttccgaaatgattctcctcaaggacagcgacgcgcattatctcgaaaacatgcaggaggcatcctcctttctcgagctgcctgagctttccgcgcagtgcctcgtgcaggcgctcagggataagacggccaaatggattcggtaagtgagacgccgccccttgaaccgcaccgttcaaagggcgcacttcttctttttgcaggaaaaaggccatatataataggcgatgctggtttgaataaaaaaattatcatgatgaaagtctgtccttattctggaatccacgttcgcactgcattttttaaggcggtaaatgtaacctgtcttattcaaggccgtttaaaaccgccctgtgcaaacgcatgtcatgatatatgtgtctgaagcgggctgtcccgtcattaaggataatttacagggccttttccagcaaacgggcaaatcccttcttgtccgcatagaatgtaagggagactttcccttaacaggcatccgcctgaatattaagcaataggaggacatcatttgaaacacatacccagaataataagcatttttctctctgtacttctgatagcgggcattgccgtttttccagtatccgcggaagaagggcttacgctcgacaaggagcgcgccgctgtacagcttggcgcaaagcttaagcttaacgcgtctgtaaaggacggcgttagctggagctcgtctgacgattccatcgcagaggtggacgaaggcggcaccgtaaccgcaaaaaagatgggcgaagccaccattaccgcttccctatcctccggcgaagaggccagctgtattgttacctgcggcttttacacgggaatcgacgtatcttcctttaacggcgattacaccggcggggaggaaggcggccccgtcgactggaagctcgtaaaggagcagggcatcgattttgtcatgatccgcgcgggctacggctgggaggacttccccaaccagaacgacagccgctttgttgaaaacgtcaggggcgcggtggaaaacaatatcccgttcggcgtttacttctacagctatgcggaaaatacggatgacgcgaaagccgaagccgcttatttcctgcgtgaagttaaagaatatatccccgatatgctagataaaatcacgctgcccgtggcttacgatttggaagagcccgacatgtacaccatgcccgcttcacagctcacagacattgcgcttgccttctgcaacgagctgaaaaaagaaggcttcggcacaatggtgtacgggaactccagcatttttgcgaatatggagctcgagcggctgcaaaaggacagcattggcctttggtacgccttgtggcccggcacgcccgattttggcacccatgtgacgattaacgacacgggcgttatccccgagatttggcagtaccgctcggacggctccgtccccggcgcgaccggctctacgggcaataccgacatggatttgatttatatgctcagctcctttaaggacacgatggaagtaccgaaggtcacaaaagcgcaggctgatgaaaaaacgggtaccgtcgaggtcgaatggacggagacaaaaggcgccgaaacctatacggtgcaccgagcgcctgtaaaggatggcaagcccgacgcgggagaggccgtttaccttggtaaggtaaacgctgaccaccgcgattacaaggacgagacggcacggctcgatacagattatttttactatataatcgctcatgtaaatggcgatacgctggacccttcctataccctgccggttgacggcttccacgagggcaggtccgtcaggacgccgaagctttcctatctgccgggcgatgtaaacggcgacgggaaaatcacgattgacgacgtgcttatgattcagaaatttcttgctaaaaagattaccctcgaccccctgcagcgcgcggcggccgacgtcgacggcaacggtaatatcactgtgaacgacgccattatgattcaaaggtatcttgctaaggaaattccggagctttaaagcttttttaagtattgcgccatatcgtacaaatccccactcaaaaagcattggtaaccggctgaagccggtcaatttgaagtaatttgtccacccgctttaaaatcgccgcccggcggttttaaagcgggatttttattcatatggttataatattcggcccacagctcatcctcctagaaattaccagcggtttttcgctaaatttcgggattttgtagcagaaaaactggacttttttgaagaattatagtatcattaaaccattatggctgtatgcgctcgaatcataaagctatggtcaattttaccgcagggaggaagcaatatgctaaagaaaatcagcacaatcccgttcaagggcacgcctgaacaggaggcttcgctgagagagattatcaaaaaacacaaaaacgaccccggcgccatcatgccggttctgcaggatgcgcaggaggtttacggctatctgccgattgaggtccagaccatcattgcggaaggcctcggcgttccccttgaggaagtatacggcgtttccaccttctattcccagttttccctgacgcccaagggccagaacaacatctccgtatgtcttggcaccgcgtgctatgtaaagggcgcgggcaaaatcattgaaagaatttccgaaatcatcggaatcgagccggaggaatgcacggaggacggcaagttttcgctgaccgcgtgccgctgcatcggcgcctgcggcctggctcccgttatgacaatcaacgacgaggtttacggccgtctcgtcccggaggatatcgacggtatcctcgccaaataccaggactgatatgcgggaattgtctttaaacgtcatggatatcgtccagaactccgtccgggcggaagcaacactcattgaaattaccgttgcggaggacaaaaaagcggacagccttgtcatcgttataaaagacaacggcaagggcatgacgcaggagcagatagcccatgtgatagacccgtttttcacaacgcgcacaacgcgaaaggtcggcctgggcgttccgctgtttaaaatggcggcgcagcagacaggcggcggcctcacgattgaatcaaaggtaggagccggcacgacggttacggcgcggtttgtcccgtctcatgtcgatatgaccccgctgggcgatatcaactcgacggtaagcctgctcatccgctgcaacccgaatatcgacttttgctttgtccacagcgtggacggaaacgcgcttacgctcgacacgcgccagctgcgcgaaattttgggggacgtcccgctcggctcccaggatgttatggaatggattaacggctttttaagcgaacagacagaaatcatttatggaggtgcttcaccagatgaagtcattggctgaattacaggcaatcagagataaagcgaaaacccagcttaatatgagggaagaaaacccggatgcaatccgcgtgctcgtcggcatggcgacctgcggcatcgcggcgggcgcgcgccccgtgctcaacgcgtttgtggaagaaatcgcaaagcgcggcctttccaatgtgaccgtcacgcagacgggctgcattggtatctgccagtttgaaccggttgttgagatagaggttcccggcgaggacaaggttacatatgtaaaaatgacagcggaaaaagccgtacgggtcgtcaacgaccatcttgtcaataagaacgtcgtgaccgagtttacaatcggcgcgaactcataaaggaggaagcaaaatgtatcgttccaatgtgctggtatgcggcggtaccggatgtacctcctcgaacagtgaaaaaatcattgaagccctggaaaaggaaattaaagcaaagggcctggaaaaagaggtcaacgtcatccgcaccggatgcttcggcctttgcgctttgggcccgattatggtcgtttatcccgaaggcagcttctacagcatggtcaaggtggaggatatccccgaaattgttgaggagcacctgttgaagggccgtatcgtcacccgcctgctctaccaggagacggtcgacaaggacaccatcaaatcgctcaaccagactccgttctatgcaaaacagagaagaatcgcgctgcgcaactgcggcgttatcaaccccgaaattatcgacgaatatatcgcgatggacggctacgcggcgctcggcaaggtgcttactgaaatgacgccgcagcaggttatcgatgaaatcaaggcctccggactgcgcggcaggggcggcggcggcttctccaccgggcagaagtgggcgtttgccgcggcgaaccaggcagaccagaaatatgtctgctgcaacgctgacgaaggcgaccccggcgcgttcatggaccgttccgttttggagggcgacccgcataccgtgctcgaggccatggcgattgccggctatgcaattggggcgacaaagggctatatatatgtccgcgcggaatatcccatcgcggtcaagcgtttacagattgctatcgaccaggcgcatgaatacggcctgctcggtaaaaacatttttgaaaccggcttcgattttgacatccagcttcgtctcggcgcgggcgcgttcgtctgcggcgaggaaacggcgctgcttacctctattgaaggcaaccgcggcgagccgcgcccccgtcccccgttcccggcggtcaagggcctgtttggcaagccgaccatcctgaacaacgtggaaacctacgcgaacatctgccagattatcctaaagggcgcggattggtttaattctgttggcacggaaaaatccaagggcaccaaggtattcgcgctcggcggcaaaatcaagcataccggcctggttgaagtcccgatgggcaccaccctgcgcgaaatcgtcgaggaaatcggcggcggcgtgccggacggcaagaaattcaaagctgcccagacgggcggcccctccggcggatgcattcccgcggagcacatggatattccaatcgattacgacaacctgattgccatcggctccatgatgggctccggcggactgattgtcatggacgagacgacctgtatggtcgatatcgcgaaattcttcctggagtttacggttgacgagagctgcggaaaatgtacgccgtgccgcatcggcacaaggcgcctgcttgagctgctcgaaaaaatcacgagcggcaacggcgagcttgaggacctcgacaagatggagcagctgtgctactacatcaaggaaaacgcgctgtgcggcctcggccagaccgcgccgaacccggtgctctccacgctccatttcttccgtgacgaatatgttgcgcacgtcaaggacaaaaaatgtcccgcgggcgtatgcaaaaagcttttgcagtactccattgtggccgacaagtgccgcggctgtaccgcctgcgcaagggtctgcccgaccggcgctatcagcggcaaggtcaaggaagtacacaccatcgatacaagcaaatgcatcaaatgcggcgcctgcatggaaaaatgcaagttcggcgcaatcgtcaagggttaaggaaggagtgtggcatcaatggcaaatattaatgtaaaaatcaacggtatgcccctctgcgtacctgtcggcacaaccattctggaagcggcgaaaatggccggaatcaatattccgacgctctgcttcttaaaggatatcaacgaaatcggcgcctgccgtatgtgcgtggcggaggtcaagggcgcaaggtcacttgtagcatcctgcgtttacccgctcgaacgcgagggtaccgaggtattcaccaatacaaagaaggtacaggattccaggaggacgactcttgagcttatcctttctaaccacgaaaagaaatgcctttcctgctcgcgcagcggctcctgtgagctgcagcagatgtgtacggacttcggcgttgaggacgtgttccgctatgaagggcttaatccccagaaggaagaggaccattcctccctgcaccttgtcaggaacaacaacaaatgcatcctctgccgccgctgtgtcgcggcctgcgaggagcagtttgtcggcgtaatcggcgcgaacaaccgcggcttcgatacggaaatcggctgcgccttcaacaaaacgctcgcggaaacctcctgtgtttcctgcggccagtgcacggcggtatgcccgaccggcgcgcttacggaacgcgaccagaccaaagaagtatttgaagcgattgcagaccccgagaagtttgtcgtcgtccatacggcgcccgctatccgcgcgacgctcggcgaatgcttcgatatgcccatcggtacaaacgtgaagggcaaaatggtttccgcgcttaaaatgctcggcttcgataaggtattcgacaccgatttcggcgcggaccttaccattatggaagaggcaaacgagtttattgagcgcgtacaaaacggcgggaccttgccaatgattacatcctgctcccccggctggattaaattctgcgaatattattatcctgagtttatcccaaaccttagcagctgcaaatccccgcagcagatgacgggcgcgattatcaagacctattacgcgcagaaggaaaatatagacccggagaatattgtggtcgtttccatcatgccctgtaccgcgaagaaatttgaggtaaagcgtgacgaccaggacgccgcaggtgtgcctgacgtcgacattgccttgacgaccagggagcttgcaaggatgattaaatccgcgcagattgaattcaagaacctccccgacagcgagtttgacccaacgctcggcgttaccaccggcgcggccgcaatcttcggcgctacgggcggcgttatggaagcggcgctcaggacggctgccgacacgctgaccggacagtcgctcgacagcatcgactacaccgaggtcaggggtaccgacggcattaaggaagccacctacaatgtcgcgggcatcgatgtaaaggttgcggttgcaagcggcctgacgaacgcggcaaaggtactcgacagggtaaagaacggcgaagccgattaccactttatcgagattatgtgctgccccggcggctgtgtaaacggcggcggccagcccatccagcccggcagcgtgcgcaactttaccgacctgaaagccgagcgcgcgaaggcgctttacgaggaggacaaaaacctcccgctgagaaaatcgcatgagagcccgattatcaaaaaactctatgacgagttccttgagaagcccggcagccataaggcgcatgagattctccacacgagctacgtgaaaagagacaaatattaatttttactgaaacaccaaatttcccccggtacatttgtaccgggggaaatttaatagaaggtttaatagaaagaaagggtccctttgacagataaagccgccctggctgtgattgatatgcagaaggattatatgaggccgagggactacccccatacgcttatcgatagaatcaacgaaaaaatttcacagcagcatcccaaacggaccggatgattgtttcttataaaaacaaaggcaaaaaacataaactcagctgcgtttctgattttatgccggggctgttggttttacccggccttatcatagaaaagggagggccaagcatgtttgatggggatattctgctttcttccctgaacgaacagggaatttctgaaattgaggttacaaggattgacagaaatttttatgtcgcggcatctgcattggacgcagccgccctaggcttatcagttcattttcctctggattgcatcggtattaaaaatcaacagcggtttttcaaaacaaaaatgaatctggagtcagctaaaattataatacccagagaataataagacctgattattatgcaatcaggcgataacaagccgccttaacagagccttttcaacgctgtggtgaaattcttcctcatttgttgtatttccctgccggatattgtaagataaaagggaacacaacagggaaggatttgaaaagatggaaaaaaagcacacggggtttcttgtattccgtattatctccagcatactggcgctcatattgttaatcctatttatcgcgccgcttgccatgcataacatcaaggacatcggcaacatattcggcatcgtagcctgcacggtttatctcatctgggtaaacaaccttttctggatagggcggcttaagaaaaaaatcaaggagcacaagggtactaaaatggttttaaatgtaatctacgcgctcgtcgtcatcggcgtagtgtatggcatcgcggtttccgccagcatggcgacggcaatcgtaaaaacgccggaggcccagtccactgtcgtggtgcttggctgtaaggtaaacgggaagaacccgagcctgatgctcaggaagcgcctggaggccgcctacgattacctgagcaaaaatcccggcgtgccctgtattgtgtcgggcggccagggcccgaacgagggcatcagcgaagcacagtgcatgtacaattatttgacagagcgcggaatcgattcctcccgcatttatatggaggacaaatcgaccgacacggacgaaaatatccgcttctcccaaaaaatcattgaggaaaataatctaaacggcaatctggcgattgcaaccgacggcttccacgagctgcgcgccgcaatcatcgcgcagaaaaacggtgtagagacaatcggcgccgttcccgcaaacacgccgctgtacctactgcccacctactgggtgcgcgaatggtttgcaatccctgtagaaattataaagccctgataaaaggcagcgtccaaaatgggcgctgccttttcttaactgccgattatttttatttggctgcaattacaaagacgcttctttcaaatataaaagcgccaaacagtgcatagccccctttgtgcaggccaaatacaaaagctttcctatttataaagttttgctttgcgcaggcaggttggaatatgcccgagcgcgaaaaccgcagacgcggctagtaagaaaagcgagttgccccaaacgccagagaacgcaaaggcgaacaccgggaacacagccatcggtaccggcagggcgagcagaggacggtaaagcaggcgcgcctgcctccctgttaaaaaatatcgcagccatagcccgtagtaaaccgcgatgcatatggccattaaaacagcccatacgtcaaagggccgtccgtcgaagctgtcgtgcgacatgacgagcagcgcaatcagcgcaacctgaccgatatactccataatggtaaaaaaacgccccgcgcctgtttcttccgcccgcacgttttgcggcggaaaaaacaggaaaataatattcggcagcagcataaccgccgcgatgattgtccccgtgatggaaaagcccatacctttccccttcctgtcgtcaaaaaatcgcgggcaattactcgttgcgtaatcgcccgcctgaaaatacgattgttttagcccttaattttaaacatgttcttcggcgcgccgcagattgggcatacccagttgtcgggaagctcctcaaacggatgctgcgggtcgtcgtacacgtagccgcagatggtgcagatatagcgttcctccgggcttgtgtcctgcgatgcttcttccttacggtaggtcggcgcgttcttcggggctttgcccttgataaccttatggtaatagtcgtaggtcatcggcgttcccttgtattcgtcgctgccggcggtcacctcggcaagaaagaccgtatgcgtaagtgtttctatgctgtcgagcaccttgcagaggaaccagcagcagatatcttcccgtaaaacaggctcgccctcgcgcaataccttgtaattgacgtttgcaagcttgtccgcgttccttccggagctgaagcccagcgcgccgattacggtaccggacgtgttctcagacaacacggaaacggcgaattcgcctgtccttttgatacattcgttcgtatagttgtcgtggttgacgctgacggcgacgaccatcggctctgccgtgacctgtatgaccgtattgacaatgcaggcggtcgggcgctgttctccctgcacgccgatggcgaacatcccgtaggacagggttctcaatatatcaggattcatatggttccttcctttcaaggcggcagccagccgccgttctttgcataatatttcttttttccggaaatcccggatttccttatcagtatatcacagcaaacacgtcaaatgcaaccgattttttagatactttataataatctatccaaaacaggaagaagaaacaacaaaaaagaaaaaatctaccgcaagacgactggattcgcctattttcgcgcgcaaaaagcgcccgcccaagtggacggacgctttattttaagcttgattattaaacttattcgtacattggatatttggcgcaaatttcggttacgcctgcgcgcaccgcatccgccgtgccctcgaagtcgttaagggtcatggtaataaactttgcaatcttgtccatgtcttcctctttgagacccctcgtcgtgaccgcagcggtgcccatacgtacgccgctggtgacaaacgggcttctcggctcgttcgggacggtgtttttgttgacggtgatataaacctcgtcgagacggtgctccagctccttgccggtaatttccatgtcgcgcaggtcaagcagcagcacgtggttgtctgttccgccggaaacaagcttattgccgcgctttacaaggccatcggccaaagccgcgcagttctttacaatctgcctgccgtactccttgaattcgggctttaacgcctcgcccaggcaaacggcctttgccgcgatggtatgcatcagcgggccgccctgcgtgccggggaaaattgctttgtctatggcctttgcgaattcctctttgcagaggataaggccgccgcgcggtccccttaaggttttgtgggtggtcgtcgtgacgaaatgcgcgtgctccaccggattgggatgcacgcccgccgcgacaagccccgcgatgtgcgccatgtctaccatcaggtacgcgccgcacgcgtcagcgatttccctgaacttctggaaatcgataatcctggggtacgcgctcgcgccgcagacaatcatctttggcttgcactcgagcgcctgctccatgaccttgtcgtaattaatccggtgcgtttcggggtctacgccgtacgcaacgaaattgtagtatttgccggacaggttgaccggcgagccgtgggtcagatggccgccttcgttcaaattcatgcccataaccgtgtcgcccggctccagcatagcaaaataaacggccatgttcgcctgcgcgccggaatggggctgtacatttgcatgctccgcgccgaacagctcgcacgcgcgtttgcgcgcgatatcctctacgacgtccacgcactggcagccgccgtagtagcgcttgcccgggtaaccctcggcgtatttgtttgttagaacgcttcccattgccgccatgaccgccggggaaacgagattttcagaagcgatgagctccaggttcctgcgctgtcttttcagctcgccgcccatagcgtccgctacttccttgtcgtagcccgccacaaagccgatgctgtcgagcatgtccttgtacatcttgaccattcctttcagtcgtccattataatatgtattttattataaggtacgaacgcgcttttttcaagcgaaacggcaaaattacccgtttgggcggggctttcttttctgcggaccttcttaattatagttttttaaatttttttctttttctatctgtttttcaagcatgccggacacgacctccgacaggcttttcttttgtttttttgcgatttgctcaagcttttcggctgaatctttatccagctggattcttaccaaagccatgtcatcatcatctccgagtaattcatttgcaagtatctcgtcggtaattccagacaatatcaaggtcttttcaaacaccgccttcacacgtttgagctgcgcaagctctcccttgcgcgcttttatctcgtcctcaatctcaaggttcaaataaaaaagggctttatagtatgccacccgttctttactgtttggctcgtcttcgctgctgttcatgcacattctttcaatgaattccattacgggctgcccataaagctggtttttattaaattccattatccctctacccttccaaagatttatttataatgcgcttgtttattgcaggaggccacattttccgttataataaaaatgtatatctatgcccatgggagggtatctatccctttgcctcaaaagatacacttcatttttctacagctctattttatttcagcaaatgctgaatgtcaagagatttatcagcatttgctgaaaatcgtcgttttaaacaattttgcattgaaattttatatattcaggaggaataaatatggattttcttaatcggatttacagtcttctacaagaaaaagggatatcgaagaataagatgctgaccgacctgtctttatctaaaaattcttttgttgactggacaaaccggggaaccgttccaaacggggaaaccctgataaaaattgcgcgttatctggacgtatcggttgattatctcttgggcgcttccaatgtacgcaaaacttttgccggaaatgtacaggaaaatgatttacgcaacaagataattgaattggtgttgcaattaaacgaagaaaattatgaaaaggtgctttcctatattaaatctatagtggaacagcagaaataaataaacgcataacacgttacccgaccctgtctattccaactctttgtttctttatattatcatatgattttgaaaaaatggtgacccgagagtcacatctaactttttaatttaatttttctgttaatatgttaacttttcaaaaggggcggaaccatttcggtggttctcccctctgtttttgaaacgctttgttcatcgttttattgattgaagcattctgcttcttgggttctttcataaaactttttatgtttaatcaaaagaggagaaaccgtttcggcggtttccctcttttggaatcacctttccgccgacaagggaaaacctcgtcgcaggttttcccttgaccctttccagccgagcaaggggctgcgccccttacaaaccccacatgattgaaaccatgccgttcctcgttttatgtacgggatgtagaacagatactgcgggacgtttctgcgccgcgcctgcgcgcggagttcttcgcgtgatgggtactttctaatttttccaagcttattacctcatggtcagcccccattaagcgtttctgttcctaacaatgtccattttagactaattcagtctaaaagtcaatagactatttttgtctatgataggatttatttagaaatgcggggaggtgtattttatgaagtttcatgaaagaattagagcgttgcgtgaagataacaatatgtcgcaagaagaaatggcggttatcctccatgctacacaaagagctgtttctcattgggaacgaaacgattctgaaccaccttatatgactttaattacgtatgcgaaatactttggtgtttctattgattatttactcggtcaaagcaagaatccatttaaaagttggatagaggaaagacagtaatctattttaagtaatctgagaaaactttcccgttacaaaaacgcgtgaaaaactaaccccacgaggtactccgcgcgcaggcgcggcgctggaacgtcccgcagtatctgttctacactccgtacataaaacgagaaacggacagttttcttctagggggattttcaaggggctttgctccttgaatcggctgcggagggataggcggagggcggcgtgatgctttgccgcccgtaagccgtaagggaacccatcgaaagggttcccttggaaaagcgctcgaagaggggttacaaaggggaggaacagccgcaactgttccctcccctttgattaaacatagaaagttttatcaagaaatccaagaagcagattgttttcttcaaaaaagagaaaaagcatgttaaaaaaaagaaaaacagcggattgtttttcccttttgattgaacataaaaagtttatgaagaaacccaagaagcagatggcattctttaaaaagagagagacaggtttcttctttgaaagcttcattcaataaaaaagaaacggcacgtttcaaataaaaagagagaagcaggctgcttcaaaaaagaagggaaaccattcaccatgccttccctccaaaaagatggaataaggattataaaagggggaaagcccaggctttcccccttttctttatatgtcgcgttcaacaaccgtcccctgcttcagggattccttcgggtcgattacccgctggttcttcgagccgcggaaatgcagcatcaggctcttctgttccaggacgaacggcccgtcgataaggatatccgtctgctcaagcagctccttccactggggatgctcctcaaagcccgctgtgagcttttcaaacgtatagccggtatacgtcatgatattcataccaagcgcgtgtacctgccttgcaagctcagagagcgcgcccgcctgctcaaacggctcgccgccggaaaacgtgacgccctgaatcatcgggttttttttgagcgcttccataatattgtctgtgttcgtttcgtatccgccctgcgggtcgtgcgtttccgggttatggcagcccttgcagtggtgcgggcagccctgcgtaaacacaacgaaccggatgcccgggccgtcgacaatcgattccctgataacgccggcaaggcgcagcttacaattcataaaaccatcctctacaaaacaggaggcggaaatcaacatttccgcccgtcccgctatattctttgttttacgtaaacgcttatacctcttccatttcagaggtaatcgcgtgcttgaccctgtcatcaacctcggcgcgcttggcgttgttgaagcggtcgaccgtaccgacgaggtagcctgtaatcctgcgaatccgttcaaagccgtaatgctcgtcttccttcctgccgcattttgggcactcgtcgccgatgatgccggtaaagccgcagcaggggtccctgtcgacaggatggttgatggagccatagccgatgccgcactccttcatgaaacggacgacctgctcgaacgcctcgaggttctccgtcgggtccccgtcaagctcaatataagagatatggccgccgtttgtcaggttatggtacggcgcttccagcttaattttatcatacgcggaaatgttgtagtaaaccggtacatggaaggagttcgtataataatccctgtcggtcacgccgggaattttgccgaagcgctcggcgtccatgcggacgaaacggccggataggccttccgccggcgttgcgataagggaaaagttcatgccgtatttctttgtcgcctggtccatgcgcttacgcatatagccgacaatctcaagccccaggttctgggactccttgctctctccgtggtgcgcgcccacaagcgctttcaggcattccgcaaggccgataaagccgagcgtcagggtaccgtgctttaaaatatcgcggatgctgtcgttcgggccgagcttgtcggaatcaatccacacgccctgacccatcaggaacgggaagttgcgcacaagcttctgcgcctggatttcgtaacgctccaagagctggtcaataatcaaatcaatcatgcggtcgagctgctcatagaagaaatcgatattgccgttgctcaaaatagcaaggcgcggcaggtttacagaggtaaagctcaggttgcccctgccgtttacaatctcgcgcgtggggtcgtaagcattgccgattacccttgtgcggcagcccatgtacgcgcattccgtctcgggatggccttctttataatactggaggttaaacggcgcgtcgatgaacgagaagttcgggaacagcctcttcgcgctgacgcggcaggcaagcttgaacaaatcgtagttcgggtcgccggggttaaagcttacaccctcttttaccttgaaaatatgaatcgggaaaatcggcgtttcaccgttaccgagcccctcttccgttgccagaagcacgtttttaacaaccatgcggccctcaggggaaatatcggtcccgtagttgatggagctgaacggaatctgcgcgcccgccctggaatgcatggtgttgaggttatggacaaacgcctccatcgcctggtacacagccctgtctgtttctttgtttgcgtggttgaacgcaaagcgctgcattttgcccgcaagcttctcgccgtacttttcagtcagcagggatagctccgcctccatgtaaatttcgccgtcgtcgagctttggcgtgcttccgctgtcggcctccgccgtgttcgcaaggtcgagcaccgtctgcgccgcgtccgcgtcgtctgtcaaaagctccgccgcgcgggacaggttctgcctgtaaatcctgcggtaggttttcgcgacgccctttgccatgccaaagtcgaaattcgggatgctctgcccgccgtgctggtcgttctggtttgactggatggcaatacacgcaagcgccgaatagctcgcgatatcgttcggctcacgcaggaagccgtggcctgtggagaagcctcctgtaaagagcttatcgatatcaatctggcagcaggtcgtcgtaagcgtcaggaaatccaggtcgtggatatggatgtccccgttgcggtgcgcctgcgcgtgcttcgggtttaatatgtacatctcataaaactgctttgcgccctcggagccatacttgagcatggtacccatggccgtgtcgccgtctatgttcgcgttttccctcttgacgtcgttgtccttcgccgccttaaaggtcaggtcctcataaatcttcatcaggcgcgtattcatctcacggattcttgtacgctccgcgcggtagaggatatactccttagccgtgcgcgcgtgcccgttttcaatcaacactttttctacggcgtcctgtacctcttcaacggtaggcgaatccacccgctcgttttcaagctccgcctcgaccttcagcgcaagctgctccgccgcctgatagtcgttgccgccgattgcctgcgcggccttataaatagcatccgttatttttttcaggttgaactcaacggtgcggccgtctcttttctggatggttctgagcatggtacattctccttttaacaactcttaatctcacaggagccataatctcccgtatcacaatatgtagtgtttatttcttccaacgcttgaatagtatagaccatatacagaagttagtcaatggtaaatctgacagtttttccatggctttttcgtgcaaaaattcgggtatcaagtctttttcacttattggaatcaaaacaaggtgttgtgatttgtttttatattaacacaatatatagagataaatcaagaattattctcggtttttatttttcctatgcagaaagcccaccctgttttccgcatggatatgcgaaaaagggcagggaaacctcctgaaatcttttccacttgttaaaatacaatatcttgtgggagccgccgtaaaaaccagcgcaatccggtaaaaggaaatgcgcgcgtggaaatgacaattttgttaccctttccgaaaaagaaaaatcccaatccttccgggagaaaaagcacgcacagccctgtttttgtcaggcaaaatccattgcctgaggccgcttatctatagtataataaattagataaatttttgctgcaaaaggagcctctatgaaaagaaaagcaaagcccgttcaaatagaatatctccctttaaaggaaatacaagcgccgctgcttttgtggtaccggcaaaacgcccgcgagctgccctggcgcagcgacccctccccctaccgcgtgtgggtaagcgaaatcatgctgcagcagacgcgcgtggaggcggtcaagccgtattttgcgcgctttatggaggagctgccaactgtggaggcgctgagccgcgcgcaggacgacaagcttttaaagctatgggaagggctcggctattacagccgcgtgcgcaacctgcgccgggccgcgcaggttattatgtcagactgcggcggacgcatcccggacagccctgaggagcttaaaaagctgccgggaattggaagctacacggccggggcaatcgcctctatcgcctatggcattccagcgcccgcggttgacggcaacgtactgcgtgtcgtatcgcgcgtgctgcgctgctatgagaacatcgatttgccgcccgtgcgccgcgcggtagaggaggccctgcaaaacgtgatgcctaaggaatcccccggcgattataaccaagcgctcatggaattgggcgctaccgtctgcctgccaaacggcacgcctaaatgcgcggaatgcccgctgcgcacactttgcagggcaaaaagcggcaatgttatctccgagcttcccgtccggtcggaaaagaaaaagcgccgcgtagaggatttgaccgtatttgtttttatacgggagacaagccccggcaaataccagacggcgctgcgccgcaggcctgggaccggactgcttgccgggctgtgggagttcccgcatacaggcggtacgctcaatgaggaggaagccgcggcactgcccgggcaatggggcataaagcccttgcagctgcttgaaaaacgaaccgcaaagcacatctttacccatatcgaatggcatatgacaggctacctttggaaggtggaggcggacgaaaatacgccgtttacctgggcggacggcgacgcgctttccagtgtttacgccgtaccgaacgccttctgcgcgttttcagccgcggtgcgtggctacctgtcccctgaggaacctctgccagaatgataaacagctcaaaaaagccggacgtttcgtccggcttttttatagattcccagcctgattatttaaccggctttgggagctttaactttttgacaggaacgccctgcgggttttcccttatctttttctccgccgcctgttcaaacagccttacatcgttattccaagccttgtaagcggcgtcgttcctgcggtcgggcaggtcaaaattttgggaaaggtacgcgccgaggtatgcggttaccttccgggcgccgtaaaggttcatgtgctcgccgccgtcctttgtgtcgctgctccagtcgattcccatttccctggttttcaggttcaggtcaagcagggcaagcccgttttcctgcgcgtactgctgcgccgtgttatggcgccggtaatcccaggaacgggcgtcgggtatgttaagcagcagcacttttgcgccgttttcctttgcaagccggacaattttgtcaaggtacagcctgtccgcgctgtgcatcggctcggcctcatccgttttattcatatattccccctttgtataggggcgtttcgaaacatcaatcaagtaacccttttgagggtcgtgcctactgtaatcaggcgcgctcaatatatcaaaatcccgcagtgtaaggctcttccagcgggaatggtagtcaatcgccgggaaaagctcattaagctctgtcgccagcgcgtcttcccatacgcccagctcgccggacgggtacttcgcgattgatttcagtgtttttttctcctgtttgggcgcgttttttttctttaagtcgaacgcggagcctatttcaactatcacaagccccgggctctggcaggaaaggatatccttataaagataatacatctcgctcatcttgatgcccgggcgcgccgcgactatccccgcgtagccgtactgtttccacaggtctgtggcgataatcccgcggtaaaagttgctgctgccgagcgccgtaaaatcgagcgtgttttcaggttcgccatgaaaatacttcatcatcggcgtacgcacgcacgcttccttcgtgttttcctttggcgccagtatcagggacgccgcaccaagcagcacggcgaaaaccagcaaaaacgccaatgtctttatcagccgcagcgcggctgtttttctttttcctttatccataagctatcttcctttaaaactgggcgtatatcaggtcgattatgcggtatcccgcaccgtaggcgccgaacaggatgaccgagaaaataccaatatagtaaacggcccatctggccgcgagcgttctcctggcaatcacgtcgcggacgacaaggcctttttcctgcataatcccgaccgccagaataagcagtacagacaggaacagcaaaataaaatcgcttgtatagaggccaaaatcacgtatcagcgcgccggaagttaaaacacccgcgtcgaagcctgtaaaaaccgagccgaacagggtaaacgcctgcggcaaatcctttgcgcggaaaatcagcataccaaagcaaacgagcaggaacgtccgggccatctgccataggcggtacccgcgcgagcttatattgatatgcgccttagcaatgagcctcctcgccagcggctcaaacagaagccctatcatcataatcaggtagtaatacaggccatacaccacgtatttccagctcgccccatgccagataccattgccgaaccagacgaaaaacatggaaaaggcaatgggcgcgagtttaccgaaatgctcgtttaaattctttttcgcctttttgctcaggttcataaagaatttagaaaacgagatgggataaaaaatataatcgcgcagccacgcgccgagcgttacatgccacctgcgccaaaattcctgtaccgagcgggagaaaaacggccttctgaaattctctgcaaggctgacgccgaacagctgcgcaacacccgttacaatatccatcgttccggaaaactccgcgtaaatctgcaatgtatagagcaataccgccagaacgacgggaatgccgccaatcatgcccgcctggtgcccgaattcatcgttaacacatttaaggccgtccaaatcggcaaagcacaggcaaaatcggtcgcgcttttccattcgctgtgtgagcagcatggaaaaatatttccggttgcagcagccggtcagcgggtccgtataagcaaggaaatgaagctcgttttcctcctgcatccgttttaaaagctcctcatgcgccgcgtggttctgttcgcggtaccggttgagcctgctcattttaaaggcatagagcgtcgcgatataatagccgaccagaacgctgatacacgccttgacgacccagattttaaaaatcaggtaattccccggcatgtaatagaccagcaggtttaaaaagagataacagtacatcgcagtaataagccgcgtggaaaatttcaggtttgacgggtcggcggcaatcgtgccgacacgctccatccatgctgtttttctgatgatttgaaacacggcgccggcaaggataaacgccgcggctaccggtataaatttatattcgttgttcgggctcgtgccgtcaaaggccgaggcagggatatcctgaacaattgccatgaccgaccgggagagtatattaatgctaagcccaatcaaagcgcaggtaaggccatggaacacgctctgccgcagcgggcaccgaaacaaaagtgcggtctcggcaaccaggaaaacagcgaacgccgtccaattgacaatcaggtggagctgcagatagctgcaggcaataaacaggatataattcaccgcaaaggttgcgcctacgcccttccagcgcacgatacgccgtcctgtctgttccccaatatattggaaatactgccagttacagtaaaaatacgcaggggaaaacaataaaatgataagcagctgcattatgaatgcccccctgactgccggcttagcttatcggcatacatattgtggtcggcttcgctgatgagctgttcagcagtctttggggaatgggcgggaacctctaccactccaaagctaaacgacagcgggaccgcgccatgagtgacggcaggcgcctttgaacgtatttcttccattcgcgtatctgcctgcccttttccgcagtttggaaacaaaatcaagaactcgtctccgccaaagcgcgcaaaaatgtcgtcccggtcaagattttcacggatgagcgccgagaaatcgagcaggtaacggtcccctatcgtatgtccatactcgtcgttcaccttctttaagtggtcaaggtcaatatatacaagcgcaagcggctccccgcttgcgagcagcaggttcatctgttccatcgcaaacaggcgcgtgtacgcgcccgtcaagccgtcgaggtatgcggcaatccgcagccggcgcgcacgctgtaaatgctccagcttttgccgctccagacggtcgtgctcttcttcgagccacgcgttcttcgtaatggagtaaacatggctcataaacacatacaccatcatcagcagcaaaagcacgcttccaattaaaaacagcgcggcaaaagagcccggcagattgaacatgcttggtatactgtcgaacaggacatagccaatcccaaaccagctgaaccggataagcaggcgaaactcttcaccgctttgtcccatcaggcgtgatttctccttaagttcaccgttgagaacaatacccagcccgatgcacaggtctgcaaatgttgcaattatcaggcacaaattacgcatgctgaagctggaaagcaaagcaaatatgctggtcttcaaaaaaagcgccgtcacacccagcacgagcaaatggacgcttgcaaaaatcaggattcctatatcggcgacaaaccaccggcaaaccatcctgccgccgagcagcaggaaaaataagcatttgctgataaaaagcgtcagataaaatacaggcaatgggattccccaaacccccatcgcataaaaaaccacagcggtaaccgccataaaaccggcagccctcaagcgggggattttctccgccggctgaaggatagcaaaaaatttcattaaaaccaaatcgcagggcaaaaccagcaaaacaagcagaaccggcagcccatagtggtacaaggcaggcataacttctccccactctcttgcgcgcggcaaaaagccggcgcggctgccggcccgaaatagccgcagccaatcaaacataatcttctccaaattctccagtcaaaaagcagccgtccccatccgtctgtccaggcagcctgttatataccgccgcggcatgggaagaacgcccgggaaatcgccgtttctccccctgcgcccggggctggagcttcacaaaaggctgctttttccatctatcaaggtttccccattttcataactatagtttaacatatgcgcgaaaataaaacaacagtcattcctattttgtgtaagcacaaaaagaataaaatttatgcaaaaacctgcacgcggattattaaccagcgttgatacttccttcaggcttttcggtttactgtgaaaaaccgtctgaaatccgcggctaaaaagggcggggtacattatgcgccccgccctttgcttaatcgaatttatttttgttccagtagtcgtaatcgcttgcgtcatcttgcttttcatctaaacaatcttcgctgtttttaaaaagatttttccccatggtataaccgtggtttgcaagccggacatatgcaactgctgctaccactatgactgccacgagcattataatcgccaaaatcatttggcctgcacctcgccttcgcgcagcttattgctcctgttcaggctgcgccgcaaccccttcggaaaccgctgccgtttcggcctgtgcttcctccgttttatcgagcggcttgcccagaaattccggcagcgtcatccctgccatctggaacatttcgttcatcggtgggatggatttcagcatactggacaggaaattcgacgttgtggacgtcccgtccctgccgttcataccgtcccatacggtaaccttatctattttgaggttcttcaccgcttcaacctgcgtttttgtgagctcctcaatcttgtcggcaatcatcagcttcatcgcgtcgtcggcgctgccgcccgcagccgccactatttgcgctaagccggctgcctgctttgtaagcatttcctgcacaccacgcgcctgcgcttccattttcgcgtaaattgcatccgcctcgccctttgcgcggcgcctgatttgttctgcctgcgcctcagcctgaagctccatttttcgtttttcaatttccgttttgacgatgacatctgcttcaagcgttgcctgttcacgtgcaaaacgcgctttttccgcgtcctgctcggcggcgtacgcttcctccagcgccttagcggactgaatcttttccgccgccgtagcgcggcgctgtgcctcggactgcttttccacaagcgtagcgttcgattcagcgacctgcgcctttgcctcgttttcacccttgatagcttctgaatcagcaagcgaaacctgcacgcgctgctcgcgctttgcatttgcctcgccgatagcgccggagcggtcggcctcggctacggaaatcttcgcgtcattgatggcttttgccgcggcttccttgccaagggctgaaatgtatccggattcgtctgtaatatctgtaacgttgacattaatcaggcgcaggccgatttttttcagctccgtttccacattattggatacggcggccagaaatttatcgcggtcggtgttgatttcttcaatgtccatcgtcgcgatgatgagcctcaattgcccgaagatgatgtccttggcgagctcctggatttccgtgagcttcatgccgagcagacgctccgccgcgttctgcataacaccaggctcgacagatacgcccaccgtaaaccgggagggcacgtcaatacggatgttctgcttggacagcgcgtttttcaaatcgaccggtatggaaatcggagtcaaatccaggtactcatacgcctgaatgaccggcatgataaacgccgcgccgccgtggatgcacttcgcgctgcgtgaggtgccgtccttattagagccgattttaccatatacaacgaggattttgtccgacgggcactttctgtaccgcgataaaaggacaattagagtcgtaaacaataaaacgacgataacgcaaattagaatgattatggctggatccattgtgaaattccccctctgttttgattggatggtcccgttaccggctcgacctgtaccgtctgttcatcgacgaccgcgcttacgcgtaccggcgtaccggtcgggatttgctgctgtgccttggttaccgcgtcgagctctaccaggcgctcctgcaacataatcgtaattttaccctgccccttttcgcacgcgggtattgggatatagacctttcccgttttcccaattgcgtttccaacgttcaggttgcccttatcctgcagcctgaacgcatacttgaacagcagggcaatgcccactagggcagccgcgcctgccagaaaggccaagcctaccgccagcccggcgtttaagtatttggacagggccagccccgtccagcctccgaccgcaaagaacgcaaccaggccgcgaaccgtaaacagccgaagccccgggtcgctgtcttccccgccgtccgcttctccgtgatggaggtctccatggaagccgtcctgcgcgtccacgtccatatccatgtccgtatccatatccgcgtccaaatcgcccacgtccgcgtggtcaaatccaaacccaaacaacagcatgatggattggataaccagaataatcgttgcaggcgccgcaatacaaacgaaaacctgctggattaacgtcatggcgttccaccattcccacatgtttctccccttctttctttaccggaatcatttcaccaatcgttcttctgccgctttggcaagctggtcccttctgacccgctcaaacagtgcgtccgcccgtttcttgacgatagaagatgcatagtaggtcagaataatccgcattccgcacagcaggcgcttgcgcgcgccggcatacggctccgccgtatgtacgacggcatgctctacaatttcctcaaattccccctcggaaagtaccgtttcaaaatccacctggtcgaggattgtgcacaaaaggcagtaaagctgcgcgtctgaaatcacgtgctcctgcgcgctgtccgcttccccgttcgtataagcgaggagcagggcgatttggtcgagcttcatcacgccgcgcagcatgtttatcatgataatacgcgcgacatggttctcgctgtaccgcttggcgaccggcttctgtacccagccgcggttaatccagttttggattgcgggggtatcaagtcccgtaatttcgcgaacctgcgccagcatcagcccttttgtaacggaaaagacaccgccgaaaaaagcctgcgcgctcctgtcattccgttccactaccgtaccgggaaaatacgccttcaaacgcccgccccctttctcagcctgtggatttgccatgattatactacacattcatatgaatgtaaatagcactcttaagaattttttaaaattttgatgcagcagcataaacgaaaatcaacgctgaaaaaggcgggtaagcttggtaatgtgctttcccgccttttatccgtatttgtatatttacattgcgattatgccgtaaaccaattctgttcttctccgctgtaaagcagccacgcatttctcagcatttcaatttcattggcttggaaattttcctcatccaatcccgattgcgtttcttttaacgtttcttcatcatccaaaattccgcccgcaataacccgcaaatgcatatcttcgatatgttctacaaaatccttcagctcaacttcctcctgtacattatcagggctctgaaaaaatgtttctcccagcgtcgcatccgtgctatctgcagagatacacctgtcgagtgaatatgcgctcaagtatttatgacggttattctttttcctctccgattccaatatgcattttatctgtatttcggcaaatgcatggaaagcgccaaatcttttttgatataatcggacagcaattataaaagcaattgacgcaatattaaaacagtcatcgtattccaggcccttcccgtactttttcgcgacagatttaatccatggtacattctgttcatatatatacgtttcatttaaaagatgtttcatctactccctccttaaggcagcatatcctttaaaccttttgtccggggctttctggttttcttttgtacgcttggcggtgcatcactcgtaaaatcaggaacatatttcggattattttgaaaagaacagtctagcttacacctccaaacctcacatttttcatcccactccaccatgtaacagacaggcaggctcacttttttccggtacaaaaacgattttagcctttccgacttgaatttagcggatttcgggataagtcttgatttttcttcttctttctctgtctcgtcgagcaaaagttcttttgcatcgtctgagctgtacaagagaacacttttccctccgagcagacctgccaatttgctatttaaacgtatctccccgctcggccagactgtaaaagataaaatttgattactttctggcgccaaatcaatttgttggtacttacttaaatcgattaatttcaacagaatcaccttattttaacatgttttctatattttatcatttttgtttataattttcaacaaaataaaacaataatactaatattttagtaattatcttgtttatttataaacttattaatgtaaattataaatttaattaatttaaatatttaaaatatagttttaattcactcaaatcaatttaagccagacaatttgtatttcctttattacattaaaatatatttgcattgcatagaaaaataaaaaagggtataataggatttaacttaaaatgactattggcaggtgataggcatgtacattgctgatttacatatccactcgaaatattcccgcgcgacgagcaaagaatgcgttcccgagtacctcgacctatgggcaaggcgtaagggaatcgacctgattggcacaggcgatttcacccatccggcgtggcgcggggaattaaaggaaaagctcactccatcggaggaggggatttatatcctccgggacgacgcgcgtatttctgatccgaccgttctgggtacaaagcagacgcgctttgtcgtatcgggagaaatcagctctatttataaaaagaacggtaaggtacgaaaggtccacaatgtcatcctgctgccgtcccttgaggatgccgacacactttcgcataagcttgaggcaatcgggaatatccattccgacggccggccgattctcggcctcgacagccgtgatttgctggaaattacactggaaagctgcccccaggcggtgtttattcccgcgcacatctggacgccgcacttttcgctgttcggcgcgttttccggcttcgatacgattgaggaatgctttgaggacctgacaccgtatatccatgcgctggaaacgggcctgtcctctgacccgccgatgaactggcgcgtctcggcgctcgaccgttaccacctagtatcaaactccgacgcgcattcccccgcaaagcttgggagggaagcaaatattataaacacagagctttcctatcccgcactcaaaaaggcgctcgagggcggcgttaaagagggctttggcgggaccatcgaattctttcccgaggaagggaaataccattttgacgggcaccgtaactgcgggctgtgcctgacgcccgcacagtctgaggaatacggcgggaaatgccctgtctgcggcaaaaagattaccataggtgtgcagcaccgcgtcgaggagcttgcagaccgcgcggagggctttgtattgcctgacgccgcgccctttgaaagccttgtccccctgccggaggtgctcgccgcgtccaccggctacagcgccgcgggcaaaaaggtcgcggcgctgtatgaggagcttctgtacacaatcggctctgagttttttattctacggcaggcgccgctggaagaaatcgggcatactgccgggccatgcatccgagagggtatccgccgccttcgtttagggcaggtgcgccgcgacccaggctatgacggcgcttacggggtcatccatattctggaacgggacgaaatcgaaagcttaagcgggcaaatcagcctattcggcgccacgtcctctgcagactggcatacaaaagccaaagcaggcgctaagcctatcaggaaaaagaaatctgcggagcttccgccggaagaagagcgctccgcagaacaaaaggcggcttcgcaggatttactttccggcctcaacgcggaacaaaaacaagccgtgaccctgccttcctcaggcgccgctgcaattatcgcgggacccggcaccggtaaaacaaagacgctgatttcccgcattgcttttttaataggggaatgcggcgtaaaaccgcgtgacataaccgctgttacctttacaaacaaggcggcaaaggaaatgcgcgaacgcctcgcacaacagctcggctctaaacgcgcggcggcaggcgttactgtcggcacattccattccatctgtttacaaaggttaaaaaaagaaaaagagagcattacgcttttagacgaatacgaggcgctcgagacagcggccggtataataaaagacctgaaaataaaaatatccccgcgcgagcttctgcgcgaagtatcaaacaaaaaaaacggcgtgcctttcaagcacccagaactgatggaagaagcgttcggcctttactgcgcacgtgtcagcgagctggggctgatggattttgacgacctgctgctggaagcgcttgcgctttgtggggacaatgaaggcaagcacctgcttgtcgatgaattccaggacgtcaatcctgtccagtacaggctgattcaggcgtggaacaggctaggaaaaagcttgttcgtcatcggcgatcccgaccaggcgatttatgggttccgcgggagcgacgcccattgctttgaacggctgagcggagattatcctgagctccatgtcatccgcttgacggaaaattaccgctgctcgcctgaaatcctcagctgttcgctttctgtcatctcccagaaccccggcgaagcgcgcgtgctttccgccaaccgcccggcgcagggcatggtgttcctgcgcacctcggaaagcagcctttccgaagcaatttttgtctcaaaggaaatcaaccgtatggtcggcggcatcgatatgctggacgcgcaggcgctcaccgaaccgcgtgacgcgcggctttcccgcagcttttccgatattgccgtgctctgccgcacgcaccgtcagatacgcctgctcgagatgtgcctgcgcaaggaaagcattccctatattgccgctggccgtgatgatttcctatcagatgaaacggtacgcggcgtatccggttttttccgcttcctgcttgagcagaacgacgtgccggcccttcgtacagcactgaaaaacgtttggagatgcccggcggatttaatccaaagcttttgcacagcgctgtcaaacgcgcgggaggacagccttttttccgtatgggaggaatataaaaacgcggggcccctccagccctgtatggaacaaattacggaatttctaccccgtgcgcataaagctaagccacgcaaattattagaggaatttgcggagaaaaacaacctcgcggaacacgagccgcttatacagtttatgaatatggctgttttccataaggatatggcatcctttatgcagacgctgctgctcggcgaggaagccgatatcgagcgcagcgcagctaaaacctatccggctgacgccgtgcgcctgatgacgctccacggcgcaaaggggcttgaattccccgttgtgttcctctgcggcgtaaaaggcggcagtatcccgctggaagcacagggacgtgaaaccaatatggaagaagagcgccgcctgttcttcgtcggtatgacgcgcgcaaaggacgagctgttcctgatgggctcacagcaggagccgtctgttttcctaaatggcattccgcaggaacttctgcatacggcgcctgtcagggaacacgcccaacgcaaggatgctcagctgagcctgttcgactaaaatatgttttaattcatcaaacctatatgaactacggaaagcgttgtaaaaatgggaacaaataaatatcaagataaaaagccggctccaattaattggagccggctttcctttcaacagaattattgcgtttttcttttgcgaggataaaaggccgcacccaatataccaataccggatatcagtaacaggaatatccaagcggacaggttggcggaatcacctgtctgtgtaaaatcagacggcttttccgtcggcttatccgtcggattttcggttggtttttctttcggcggttctgccgttttcctttgcaggctattaattgcgtcctcgatggctttggccatagcgtctacctctgactgcccggtgatgtttttgccgcgctccaccgcttcgactgccgcttctacggcggtaaagtccttatactcgtccttgttcaatgcgtttgcccttgctatcgcttcgtccaccttcgtatagtccgcgtctttgtattgcagcgcgccgattgcgtcctcgatggctttggccatagcgtctacctctgactgcccggtgatgtttttgccgcgctccaccgcttcgactgccgcttctaccgctgtaaagtccttgtattcgtccttattgagcgcttcggccctttctatcgcctcgtccaccttcgtatagtccgcgtctttgtattgcagcgcgccgattgcgtcctcgatggctttggccatagcgtcgaccgcggcctgcccggtgatgtttttgccccgctccacggcttcgactgccgcttctaccgcggtaaagtccttgtattcgtccttattgagcgcttcggcccttgctatcgcctcgtccaccttcgtatagtccgcgtctttgtattgcagcgcgccgattgcgtcctcgatggctttggccatagcgtctacctctgactgcccggtgatgtttttgccacgctccaccgcttcgactgccgcttctaccgcggtaaagtccttgtattcgtccttattgagcgcttcggccctttctatcgcttcgtctaccttcgtatagtccgcgtctttgtattgcagcgcgccgattgcgtcctcgatggctttggccatagcgtcgaccgcggcctgctcggtgatgtttttgccccgctccacggcttcgactgccgcttctaccgctgtaaagtccttgtattcgtccttattgagcgcttcggccctttctatcgcttcgtctaccttcgtatagtccgcgtctttgtattgcagcgcgccgattgcgtcctcgatggctttggccatagcgtcaaccgcggcctgctcggtgatgtttttgccccgctccacggcttcgactgccgcttctaccgctgtaaagtccttgtattcgtccttattgagcgcttcggccctttctatcgcctcgtccaccttcgtgtaatccgcgtctttgtattgcagcgcgccgattgcgtcctcgatggctttggccatagcgtctacctctgactgcccggtgatgtttttgccgcgctccacctcttcgactgccgcttctaccgcggtaaagtccttatactcgtccttgttcaatgcgtttgcccttgctatcgcttcgtccaccttcgtatagtccgcgtctttgtattgcagcgcgccgattgcgtcctcgatggctttggccatagcgtctacctctgactgctcggtgatgtttttgccgcgctccacctcttcgactgccgcttctacggcggtaaagtccttatactcgtccttgttcaatgcgtttgccttttctatcgcttcgtccaccttagaataatcggccggtaatggctccagcgttatagtaacaagcagggtagagcggtcatagcttaccgtatgcgcgaaagataccggataatggtctgccgcgctggcttgtatgaaatagtcgcccggcagcaggatatagcttccgtccggctgcggatcgatagcggcgccaccctctgattgggacagggaaacgacggcgtccttcggcgtggcgtcaatcacgacgtttacagcgaggggcgcaatcgtggggaatccatccttttggctaacgaaggcatccccgttgccgttgagatctgcgacaaagttttcctgcttcatgtccgcttcagtcttcttgacgccgacgtcgttcttctcctccgtgacgactgtattcccacgcttgtatacgcctagagcgctgccctccgcgctgtaatagaggttgcccagggtattcagcgccgtttcgtcaacctgtccaatcagtccgccgcttctttggggctggatcaggccggtgttgtagcagttgctcatccccgtgccgttgtagagcccgataatgccgccgatagaggaggggacggccgccgttgaggtgatttcgccatagttggcacaattcgtgaccgtgctgggcgctccgaaaacataagcggagatgccgccggtgaacgcagcttcgcccgccagcttgcccttgttgacgcagcggtcgatttcgccgtgctggctaccggcaacgataccgccaacattggtgtttttgctgtgaatggtaatgttcgcatcgttggtgcagcgagtaatcgcgccgctgctggatcccacaacgccgccgatatagctgacgccggtcgtagtgatatccatcgacaggcggctggtgcaattgctgatggttccttccgggtacatacccgcgatggcgcccatataaattcttgcggaagaatcctgtgtggcggcggtaccggtcacggtcaggtttcgtatggtggcgtttgtgccgccgaaaagcccgacgatacaaaggtctaacgtcccaccgggaaattttgtaagctgcatgtttttgaccgtatagccgttaccgtcaaatacaccgcggaagaatttgctcgtatctccggtatagtcctgtaacgagcctttgtactccccaatggccgtccattcgtgacccgccagatcgacatcctgcgtcagccatacgtcgttcttccccgtgtacgcgccagtgttgacgagataggcaaactgcgcgagctgttcgggcgttgaaattgcgccgtccgtccatatcgtatcccggttggcctcatccgaccaattggcgccgtcggcggcaaacgcggtgaaagccgtcgttaaaaaagacgtcaaacccaagcataagcacagtaataccgataaaattcgctttttcattgtgaaacctcctgtaattttaattgattaacgtcgttttacccaacgtttttttggcaggggaacgaattcccctgcccgccaaacacgaaaacgcgccggccgccgggacgaaagccccgccggacagcgcgttaaaattaatcgatatatttaaaaaatatttgtgggcaataaaaaaggacagatttattctgtctgtctgtctgtctgtctgtctgtctgtctgtctgtctgtctgtctgtctgtctgtctgtctgtctgtctgtctgtctgtctgtctgtctgtctgtctgtctgtctgtctgtctgtctgtctgtctgtctgtctgtctgtctgtctgtctgtctgtctgtcaattgtggcccgcttatccatgattgtcaagcccctttttgaatttccacctctttatatccaccaaattattatacaaacttctatatttattgttataatagcacaactctccccttttttcaatagttacattgaaattttttaaattatgagtgaacaaaggtgggtcggcatatgccgtcccacctttgttctaggatgaatttttttatatggtgtgtaaggaattagccaaaatatctttcgagaaggcccttgaagccagcgccgtggcgcgcttcgtccttcgccatctcgtggacggtgtcgtggattgcgtcgaggttcagctgctttgctttctttgcaatctcaaacttgcccgcgcaagcgccagtttccgcgtcgaccctcatctggaggttcttcttcgtgctgtccgtcacgacctcgccgagcagctcggcaaacttcgcggcatgctccgcctcttcaaacgcgtacttggtgaacgcagcggatatttcgggatagccttccctgtcggctaccctcgccatcgcaaggtacatgccgacctcggaacattcgccgttgaagttctcaacaagcccgtcatatatttctttgtcaacgcccttggcaataccgacctcatggacggttgcgaaaccggcgtcttccgtaacctctttaaacttttctttcggggccttgcagatagggcatgcgtccggcgcctctgcgccctcgtgaacataaccgcaaacagtacatacaaattttttcataacaaattgcctccatttttatgtaattaaatttatttttttccgggaaaacccggcgttaaacgagttttgtctcctccgcgccgtctttcatgcacgctgcacaagtgccgaaaaagcaaaggctgtggtagtcaacctggaaaccatatgcggacgcgaccgaataatcaaggctcctgttgtcccccgtgatttggtttacatcgattacagcgccgcatttggtgcagatgaaatgcgggtgcggctttacgttcccgtcaaaacgttcctgcccgtttaccgttccaaccgaaatgaccataccgcgttccttgaacatagaaatgttccggtaaacggtaccaaggcttaaatcggggaattcgggctttaattggttgtaaacccattccgctgtcggatgtgtgtcggtagagcagatcgaacggaaaatggcttctctctttttgctgaagttctgtcttttcatgcgatccatccttttataaataaaaacgagaatcattcttgtttctgtatttagaatagcacagccgtttctatttgtaaagaaaaaatttatgaaaatcagactgttttgtcaagtttatgaaaagcgtacatgaaccttacacataatgcggaaatttttggaatatatttattcttgcagaactttgacggttggggcggtgtattatgtattggaacctgcggatgaaaaaaagcgtcctgtgctgtatttgcatggggctgattttctgcctgtgccttgtcatggtatcgggcgggagcgttccggcaagcgtcaagacgagcgccgcggctgatgaagacagcgtaacgctgccgattattatgtaccacgggatgctgcgcgacccgaaaatgcagggggagttcgtaatatcgcccgacctgtttgaatcggatctcaggtacataacggagcacgggtataacacggttgttatgcaggatattatcgattttgtccataagggaacaaagcttccggaaaaccctatcatgattacctttgacgacggctattacaacaactatatctatgcgttccctctgcttaaaaagtacgactgcaaaatggtgctgtccccgattggctattataccgaccaatacagcaagacgaccgacctttccgccacctattcgaacgccacctgggacaatttaaaggaaatgctgctttccgggtatgtggagctgcaaaaccattcctataacctgcacgcaagctccggcagcaggcttggcacgcagaagaaaaaaactgaaagcgacggcgcatatcaaaaaatactgcgcgacgacctcaaaaaagcgcaggagcgttttcaggatgagcttggaatgaagcccgacacatttacctatccgtttggcgcaatcagcaaggagtccctcccaatcgtcaaggagctcggtttcaaggcgacgctgacctgttcggcaaagcttaacaccattacaaagggagacacggactgcctgtatgggcttgggcggttcaagcgcagcaacaagggcacaagcgcggccttcttccataacataaaataacacgctgtgtcaatgcccctcgccgggtgcatataatgtcctatataacagaaggagttgaccgtaccaatgccatcggtttttttaagcccctccacacaggaattcaatccttacgcggacggcggcaacgaagaatattatatgaacctagttgcggacgcgatgatcccgtatcttgtggcaagcggaatcaccgtggcgcgcaacaatccggaagagagcctgcgccaggcaatcaacctttcaaattccggtaactacgatttacatttggcgctgcattccaacgccgcgccgccaaacctcgcgggacagctgaggggtaccgacgtttattattacgcgtcgagccaaaagggcgccgcggcagccaatatcatcgcggataattttaaaaaggtttatcccaaccccgcgcttgtaaagacggtaggcactacaagccttgcggagctgcgcatgacgaaagcgcccgcggtgcttattgagattgcgtaccacgacaacccgcaggacgcccagtggatacgagataatatcgacagcatcgcgcggaaccttgcgatgtctgtcgcggagattttgaaggttccctttagggaaccaaccgattaaatgaaaaggaagggcggtggcccttcctttttctatacctttttatttcattttttgattgcactgttttggtttttgggaagcaacctgcttctctctttttatttgaaacgtcccgtttcttttttattgaatgaagctttcaaagaaggtgcctgtctctctctctttttaaagaaaaccatctgcttcttggatttcttgataaaactttatatgttttaatcaaaagggaaaaacaatccgctgtttttcccttttgtaaacccttttcgtcggtacaagggacccctttcgatgggttcccttacggcttacgggcggcaaagcatcacgccgccctccgcctatccctccgcagccgattcaaggagcaaagccccttgaaaatccctctaagaggaaactatccgttcctcgttttatgtacggggtgtagaacagatactgcgggacgttccagcgccgcgccttcgcgcggagttcttcgcttactcttctttcagacagcgctctatcatgcttactacaacattattaaaactggtattgctttctttcgcaagtttttcaatttatactctccactagataaattaatgtatgacaaatttatataatacattagaatttctaatgtaatttctgttgtattatttttttgaaaaatatgtataattaaattgcaagatggaataaattccttatgctaaatttattgtaataggaggatgtttatgggtgaagcagtagaaaagaagttgctttcggagctattgaaggaaacaaaactagatgcggacgtactcgaaaaaatagggtttgcgagcagggcgttctatgtattccgttcgtttgatgtagtaccgtttggcgactgcgaatatgaggattacttttgccttgcgtgtttgacggcaagcctttcctcctgcggcagccagatggagattgaaagcggctgcgatatgattgccttatgcttggagctgagcttaggcatacaggagaaacaggcggtacggaaggacggcatacggaaagaaggggttctctgtgatacataacagctatctggaagagctaaacgggctattgcaccggatagcggaagacccgcaccgtcaggggctttgcgccgaaggaaaagaattgcagggcgaaacggagcgcgaagagctgtacctcgatttcagctaccggaagctggacgaaataggctatgccctttactgctttgagcggatgcaggcgctcggggaaccgcgcctttctcctgaagaatggcaggcgctaaagcacagctttgtgctcggcagccttgcggtaagcggaggcaggccgtcccgtgaagaaaccatcaaaaaagcatatgggcagataaaagaaacgctcacgcattgcgtgggcatagcgtaccatacggacaagcaggaggaaggtatataaaccattccggcgaaagccgagcaaaagtaccgctcacaaagcactccacataccaagaaagtaccaacctcacgaagaactccgcgtgcaaggcgcggcgcagaaacgtctcgcagtatctgttctacgcccccagacataaaacgaggaacggatagttatctcttagggggattttcaaggggcttcgctccttgaatcggctgcggagggataggcggagggcggcgcgatgcttcgccgcccgtaagccgtaagggaacccatcgaaagggttcccttgtaccgacgaaaagggtttacaaaagggaaaaacagcggattgtttttcccttttgattaaaacatataaagttttatgaaaaaaaccaagaagcagatggttttctttaaaaagagagagacagggtccttctttgaaagcttcattcaataaaaaagaaacgggacgtttctcaaaaacccaagaagcaggttgcttcaaaaaggggaagggcttataagcccttccccttttccttttgtttctgcttgcgccgcagatacgcgtctatctggtcctcgtcgtacagaatcaaatccttgtacccggcaagcccctcgcagtggtggcgcacctcgtgcaccagtaccttacgcaggtgctcgcggtacgcttcccgcgatacatgcccgtacaccctgcaaaaagagccgtaataaatctttatgtaccttccaatcgagctggtgcagtactcccccataataaacaaatcgttgtctatcgccttcggatggattttttcctccggcagcaggacgattccgccgtttaggtcgcggtacagctcaaagggaagggaatccgcaatctcgtcgagcatttcgttcgtttcttcaattgtaaacatgtgcagtcaccgccttatctaaagcgccgcatataaaattataccttgttaatcgaggaaatccttgagctttttgcttctgctcgggtggcgcagcttccttaaagccttcgcttcaatctgccggatgcgctccctcgtgacgttgaactcgcgccccacctcttcgagcgtgcgggaacggccgtcctccaaaccaaaacgcaggcgcagtactttttcctcgcgggaagtaagcgtgtcgagcacttcggaaagctgttccttcaaaagcgtatgggaagcggcgtccgcgggcgccggcgcgtcgtcgtcggggataaaatcgccaagatggctgtcctcctcctcgccaatcggcgtttcgagtgatacaggctcctgcgccacacgcatgatttcacgcaccttatcgaccggcatgtcgagctcctccgcgatttcgtccgcggtaggctcatggccgttcgtatggagcagctggctcgataccttttttaccttattgatggtttccaccatatggacgggaatgcggatggtcctcgcctggtccgcaatcgccctggtaatcgcctggcgaatccaccaggtcgcataggtcgagaacttaaagcccttcgtataatcaaacttttcgaccgctttaatcaggccgaggttgccctcctgtatcaaatcaaggaactgcatccccctgccgagataccgctttgcaatactgacgacaaggcgcaggttcgcttcagaaaggcgctttttggcgttcgcgtcgcctttcgagatgcggatagcaaggtcgatttcctcctctggcgttaaaagcggaaccctgcctatttccttcaggtaaaccttgacagggtcgtctatggcaatattctccgcgctcgtgtcctccggggttgcggggctgctgctgcccgttaccgcaatctcaatatcctccagcgggatatcgtcaaaatcgtcctctacgatttcaacgcccatcgtctcgagcgaatcatagaacttttcaagctgttccgggtcaaaatctatttcgccaatcgcgtcaagtatttcctttgtgctgagctgcccctttgcctttccctgttcagcaagctctttcatcactgtctttttatctggcaccggtgttgtcgtcatatacgcccattcctttcctttcaaaacctttactgctttttctgtctcaatttatttaaatagtcgttaatgtcgctgatatcggcatttgcagactgtttcacactgattctatcatgctctgataaaataacatttatgtattcctcagccgcctggccggtcgcggcgtccgccgtatactttgagagcataccggcaatcgcgccgttttcatccggggtaaactgctcggaaatatccataagcatggcgcttttgccctgcatgatacgcgccgttacgatttgatagacacgccggttgaaatctgtcatcatcttatccggcggaagcttctgcaaaacgcccggcgcgttgtcgggattgttcatcacataggcaatgagcgcctcctccgcgcgcgctgcgcgcaggttgtccgccttttgcgggttgatttggtcggtacgcgcggacatttccgtctgaatctgccgaaactgttttttgcgttccccggcgacctttgcgcttgcgtatttttcaacctgctgcatgacggaatccttctggattccaacctcgtcgctgagcttacccgcgtagatttcacgttcaatcgcgttttccaaagaagcaagcacctttgacgcctccgtcaaataagcgaccttcccttccgtttgctgtaaatcgaacatacccttgagcttttgcaggcggtattccacgtcgtttccggaattttggagcagctgtttgaattttgccgggcccttgtccccgttttcacggataaactcgtcggggtccttcgcgcccgggatactgattacgcgtatgagcatccccgcgtttcgaagcagcccgattgcgcgctgcgcggccttctggcccgcctcgtccgcgtcgtagcagataaaaacctcgtcggcataccgcttcataagcattgcctgctcctgcgtcagcgccgtgccgagcgtcgcaacagcgtttgtaaagcccgcctggtgcagcgcgatgacgtccatatagccttccgctaaaaccagcttgcgcgacccttcgttttttgcaaggtttaacgcaaacaggttcgcgctctttttaaaaaccattgtgtcggaggtatttaaatattttggctttgcgtcccccataatacgcccgccgaaagcgataacatttccgcgcaggtcgatgattggaaacattacccggtcaaaaaaccgcgatgaaatccctccgcgtattcctcctacggcaaggtttgcctgaaccagttcatggtcggtaaaccctttcttacgaagataatcgataaggggaaagcgcgacggcggcgaataccccagcccgaaatggcggatggtatgctcgctcaatgccctgccgcgcagatagcccagcgccttctccccctgcttcgtatacagctggcggtaaaagaagcgaccggcctcgcggtttgcctcataaatgcgttttcttaaattggaaagcccctcatcgtaggagttttcgggcatatcaagccccgcgcgctgcgccaaaaagcgcaccgcctcgatataatcgagattttctatcttccggatgaacgtaatgacgtccccgccagccccgcagccgaagcagtaaaacgaaccgttttccggataaatattgaatgacggcgttttctcgccgtggaacgggcaaagcccgaccatattgcgcccgcggcgcttgaggtttaaataggaggacgcaacgtcaaccatatcgctgcgcgccttgagctcctgtaaaaaatcgtcaggcagcggcaagaaaatcaccatcctttctttttaaagccaacaagctgtatctaaactttctaaatctgttttctccagcttttcgggataaacaaatcctcgtacatttgaaccgcaaagtggtcggtcattccagcaatataatcgcagaccgcgcggtcagcgccttcttcgtctgcaatcagctttaaatggtcgtccagcttttccgtatgccgcagaaaatagcggtaaagctttgttaccaggtcgggtacctttttctcctccgcctttgcatatgggcttttgtaaacagcctcaaacatatattcatgcaggcggtcgaacgcctgctgtgttttcgcgtccatttttaaaacgccgtctgcgctgttacccgcaagcgacagcaccagcgtattgattcgcgcgctcgttttgttcccgagcacgccggtaagctccttcgggatatcatccccggtaatcacgccggctcgcaccgcgtcgtcgatatcgtggttgatatagccgatacggtcggctatacgaacgacctgcccttcaagcgtcgcggcctgctcgcccttcgtatggcagaggatgccgtttcgcacctcccaggtcaggttcaaatcctcgagccgttcgacgacgcgcacactctgctcataatggcggaagcccgtgggtgaaagctcgtcgagcgcgcgctccccggcatgtccgaacggcgtatgccccaaatcatggccgagcgcaatggcctcggtcaaatcttcattgagggaaagcgcccttgctatcgtgcgcgcaatctgggaaacctcgagcgtatgggtgagccttgtgcggaaatggtcgccctcgggcgacaggaatacctgcgttttatgcttgagcctgcggaatgccttgcagtggataatcctgtcgcggtcccgctggtaaaccgtgcgcagcgggcactcctccacaaaacgctccctccccctgcttttgctggaaagggatgccagaggagacaaattttcacattccaattgttgtgtgcgttctctgacagtcattgacgggtacctcccctggttatgaatgataccgccgttgacgatgacactgccttcgccaacgatgtgtacctgcggcacatgagggaattatacagtctaacgggaatggaacgaaccgaaaggggtacaaaatatgatgcgccgcggtggaatcgggaaatacaagggacttaaaatccctttgcttctcccgacatcccggttcgcataaaaacccatcaatttaatatacgacaaaacctttgcagttcctgcaagcttttgaaatttttttgcggttcagccgttttttagaggaaaatatgcttctcctgtaatttccgcctgaatcgacccgctgctccattcgcttaggcggctgttcaaaagccccagctgcccgcccgttatatggaattttatgcagaccctgtccgtaaaagaagtatcctccaaaacaccgccgcattcgggcagaagcgatgcgattttaccgtacaaatcataagggcaggatacaagacaggttttgcaccgctgcatagtgacgatattccccgcgccgagcgcaagccctgccgcgtgggaatacgcgcgaaccaggccccccgcgcccaacagcacgccgccgaaatagcgcgttactataacgcacacgtcggttacgccgctcttttttattacctcgagcaccggaacgcccgcagtaccctgcggctcgccgtcgtcgctgtagcgttccgtaaaaccgccgcgcagcacataggcgtacacgttatgcgcggcgtcccagtgttccctgcgcttctcctccagaaaagcgagcgcctgctcctgtgtttccacaggacggcagtacccgataaaccgcgaccgtttttcagtaaactcatccattcccgcggcttcgacggttttgtactgctccatacaagccctccctcttcttattacttttcaggatataaaaatgttgcacaagagaaaaaaacaggacggacacatgcttttgtgccgccctgtgaaaaaacaatttatttttcctgcatgccataacgctttttgaacctgtcaacgcgtccgccagtatccacgagcttctgcttgcctgtgaagaacggatggcactttgaacaaatttcaacgcggatatcctttttcgtagagcctgtctcaatcacatttccgcatgcgcatgtaatagttgtctgctcatatttaggatgaattttctctttcattctatttcacctctttcgcgcaaaccgttaataacatttgaattctaacataaagagccgaaaaatgcaagaaaaaatttttgtctctataaatttaattttatttgctgcttaaaatcacacgatgtcagcaaaatatagaatatatgtaaaaccttgcgcacttttgcggaaacccttgttataaaccggctcttattgtataattcattttgaatcggtttttttagattacattttcatatacctgtaacaactgtcttggcaagaaaggaaggcgcctctttatgagaaaaactaaaataatttgtacgctcggccccgcgaccgacgacgaaaaggttctgcgcgagctgatattaagcggaatgagcgttgcaaggttcaatatgtcgcacggcggccacagcgaccacaaacgccgcgcagacgtggtaaaaaggctgcgcgaggagctcagcatccccgtcgccactttgctcgacaccaggggcccggaaatcaggacgggtacctttaaaaaccagaaagaggagcttaaaaccggccagaccttcaccctgaccactaagaatattgaaggcgacgagaagcgctgctctatcacctttaaggatttgcataaggatgtggagcgcggttccacaattctgatagatgacggcctgattgaaatgaaggttacagacattaaggacggcgacatcgtctgcaccgtgttgaacggaggcacgatcgcttcccataaggggattaatgttccgggcgtgcggctttccctgccgtttatcagcgagcaggacaaggcggatatcgccttcggcgtggagcaggactttgattttatcgccgcttctttcacccgcagcgctgaggacatcatgcagctgcgcggtgagctggaaaaaaacggatgcaacaatatccgcattgtcgcaaaaattgaaaacgcggaaggtgtggacaacatcgacgaaattatccgtgtttccgatggaatcatggtcgcgaggggcgacctgggcgtagaaattgctatggaggaaatcccgattatccaaaaggagctgatttccaaagcatacaacgccggcaagcaggttatcaccgcgacccagatgctcgaatcgatgattaaaaacccgcgcccaaccagggcggaggcgacggacgtcgcaaacgccatatacgacggaacaagcgctattatgttaagcggcgagactgccgcgggtatttacccggtggacgccgtcaagacgatggcaaccattgccgaacgcacagagcgcgatatcgactatattgaaaaattcagaaagcgtgatattccggagcgcccagacgtgacctccgcaatatcgcacgcgacctgcaccacggcgcacgacctgggcgcggttgctatcctgaccgtctccaaaacgggacagaccgcgcgcatgatttctaaattccgtccggcctgcccgattatcagcggtacgaccagcccaaaggtgcttcgccagatgaacctttcctggggcgtaatccccattctcgtggaggagcaggacaatacagacgcgctgtttgagcatgtggtaaaggtcgcgcagcaaaacgggcttgtaaagaacggcgaccttgccgttatcacggcgggcattcctctcgggatatccggcacgacgaatatgctcaaggtgcatctggtgggcgacgtactcgtttcaggcacggtcgtcaaccacaacagcgtgtacggcaggctctgtgtctgcaagacggaggaagatgcctgggaaaactttaaggacggagatattctcgtcatccccaaaagctccaacgacatcttaccgctcatccgaaaggcaagcggtattattacggaaacggacggcatcaactcccacgcggcggtcgtcgccctggcgcttgacaagcccgcaatcgtcggcgcaaagcacgcggtaaagcttttaaaaagcggcattaccgtcaagctcgacggcacgcgcggcatcgtgttcagcgcgcacagcaaaaatgctgagaaataaggcaaattatcacggagctgccgctgccgaatgtaaagcggcgccgacataaccccatttataaaaacagaatgaaccgataaacaaaggcacagcctgcgctttttaaaaagagcggcgggatgtgcctttgttatattttacgttgtattccgcctgcccgcggacagaatatatttattaagagaaaggagcggtatatccggcatggatagccgcaggcatacgctggcacgcgttgccatataggaggtttataagaaagattccggtaaaaagggaggggcagtaagcccctccctttttatttacctttcgtgaaaaccgtatgcggcttttttacttacccagcactgccttaaaggcgttcgccgccgcttctccgttttcctctacgacaacgagcgtatacgccccgtcgcgcaccatggtataattctgcaaaagctcatactccttcgggctgtccttaaatccggcctgcttcgtagcgatatggtcggccacaaccttgtcgagctgaggctggtaattcttgtccgcaatttgaaaacaggatatttcaaacgcggagtccggcgacttggacaaatacatggtcgcatccgttaccagtccgtccggtatgacataatgcttggaaatctggccttttgccgtcttggaaaggtctttgtagtccattcgcaaaatgacctctttgacaatttcatccgtgcttatgcgggagaccgacatctccgtactgcgcatgccggtaccctgcacttgctcttccccgccgctcatccatgaaacggcaaaaaagcatgatatgaccgcagctataataataacagaaagaagcacgacggtcagaatcattctttttttaggtgatgccataaatgcacctctttctccaacatatcaaacacatgttaccctacccgcgtgtataccccttataaaacgccaactagtctctagcctttgtatctacttcttcaataatctttgccaaaaattcctctaacgccatcgcgccaatatcgccctttttgcgggaacggacagacacggtgttattctcaatatccttatcccccattaacagcatatacggcaccttctcaagctgtgcctccctgattttatagccgattttctcgctcctgtcatcaagctcgcagcgcaggcccttcgcttccagcgcgcgcatggcctcggttgctttttccacatgccggtcggcaatcggtaaaagctttacctgtacaggcgcaagccataccgggaacgcaccggcatatttttcaatgagcagcgcaagcgtcctttcataacatcctatggatgtcctgtggatgatatacgggtttttcttctggccgtcgctgtcaacatattccatgccgaacttttcagcaagcatctggtcaacctggatggtgatgagcgtatcctccttgccgaatacgtttttaatctggatatcaagcttcgggccgtagaacgccgcctccccgattcctattttatacggaatttccaaatggtcaaggattttctgcatagcgctctgcgcctcggcccactgctcaggcgtgccgatgtatttatccctgtcgtccgggtcccactgtgagaagcggtaggatacgtcctcatacagcccgagcattttcagcatgtaaatagcaagctccaggcaggatttgaattcgtcctccagttggtcggggcggcacatcagatggccctctgaaatcgtgaactggcgcacgcggattagcccgtgcatttcgccgcttgcctcgttgcggaacagggttgacgtctcgttatagcgcagtggcaggtcgcggtaagagcggcccctgttgaggtacgcctggtactggaacgggcaggtcatcgggcgcagggcaaatacctctttatccttttcctcgtcgcccagcacaaacatgccttccttataatggtcccagtggccggatagcttatataaatcgctctttgccataaacggcgtctttgtcaaaagccagccgcgcttctgttcctcgtcctcgacaaaacgctgcaaaagctggatgacgcgcgcccccttcggcagcaggataggcagtccctgaccaatcaggtctgacgtagtgaaaagctccagctcccgtccgagcttgttatggtcgcgcattttcgcttcttcaagctttttcaggtgctcctccagcaaggaagccttcgggaacgccgtcccgtataccctgcacagctgcgcgttgcttgcgtctccccgccagtacgcgcccgtacagtttgtaagcttcaccgctttgattgggctgacactgagcagatgagggcccgcgcacaggtcggtaaactcgccctgcctgtaaaagctaatcggttcgccctttgaggcatgctccctgcacagctctaccttatagggttcgttcatttcttccaggagctttaccgcttcgtcgggggcaagctctaatttttcaagcgcaagcccgctcttaacgatgttcttcatctctgcttctatttgctcgaggtcttccgttgtaaagggcttttccacgtcaaaatcgtaataaaagccgccttctatcgcagggccgatggcaaatttcgcgtttgggtacaggcgctttacggcctgcgcgagcacatgcgacgccgtatgccaaaacgccttttttccgtcctcgtcgtcaaaggtcagaagctccagcttacagttcttttcaacgggcgtccgcaggtcgcgtacttccccgtctattttacaggcgcacacagccttgtacaggccgccgccaagggattttgcaatttcagccgcggtagtgccgcatgcaaactcctttgttacgccatttttcagttctaccattgccatgacatcgttcattcctttctcttacaattgaaaagtttacagaaaaagcctcatcccataagggacgaggctgtaggtaacgctcgtggttccacccaatttcggcagaatacgctcctgcccttttcagcctgtaacgcggccagccgtcgcgccttgttaccggcgcgcgctcaaaggcggtaaaaacaagctgcctgccgtatgcgctttcagccgcggcgcatgctctctgcttgcaggtctatgcctgttttcgtccttatcaacgttttttctatctgtaagccatgttagcacagtttatgggggctgtcaagttacacgtttttaacccttatctctgccctgcaataattttctgcatatcgacgacatccttcaagtccgctttgccgcttgcgtctaggtctgcaagcttaagctgcgcgggcgtcaggataatcacgccggcaagatgcttctgcacctcaaggacgtctgctatagacaatttcccgtcgccgtttacgtcgccctcggtttttccaatcgaaacaaacccgagctggtatgcttttgcgtacgaataggcgtaggaagccggatagccgtaaattgaaagccgcttgttgtcacagcctgaaaaggcagaggatgatatgtcctggactgtatcgagaagcctcgcctcttcaagcgatgtacacccgaagaacgccgcctccccaaccgcctggataccgctcccaagctccactgttttaagggcggtgcagtaggcaaacgcagcatagctcagtgtggaatgggagctgttcacaaccgcgctcgtaagcccggagcaattgataaacgcgccctcgcccagataggcgaccgacctgggaattgtaatggatttaagccctgtacagtaggcaaacgcctcgtcgtcaataaacacgaggctctggggaaacgaaatgccggcaagggaatagcagtttacaaacgcgcgccttcctatgctgtataccccttccggtatcgtcacggaggttatacccgactggttcataaaagcgcccgggccgatttgcccaaccgtctgcggaaccgccaccgcctttgcgctgcccttatatttcacaagaatacggtcgccctcgacgacgaaatcccctgaatagctctgaagccacgccgtattgtcgaacgccaccggaccaatcgttttgacggaggaaggaattgtgatagatgttaggtttttgcagtcgaaaaacgcgccttctgagatttccgttacgctgtccggcagctttacggattttacattcagattatttgcaaacgcgtacgcggcaaccatagtcgttccgctgggaacggaggcggacgcctgcgcgctgttgtacctgagcagcacgctgtttatggaaatatacgcgcctttctgtgccgaaagccatggcgtttcgtcgaatgcgtaggccccgacagccgtgacgctcttcggataagataccgcacttaaatttttacagctgtaaaacgccttattgccgatataatacacgccatccggcagcgttacgctcttgagcgacgtgttgccctcaaacgcgctgtcgccaatgtaaaatacgcctgccggaaccgttacggaggctgcgttcccattgtatttcaggagaacgccgtcctcgacctcaaaatctgaggccgcagccattgccgtaaatggcagggtagccactagcaggcagactgaaagcaaaaaggccagccatttcttcttcatcatcctatctcctttcctgttctctgtcatttttaagctcaattgattatataaacacctctcaaaagcccgtaagggcttggacccggtatgcattccgcccgcgccgtgaggttattataacaggattgccggccgcaaagcgggcgcagcctctgcaaggaaagtgcacgacgctttccgcacctgtttcaatgttctcccaggcgccggaagctctgcttccgcctgcgccgtgaggttattataacaaaaaagcaggcttatgaaaagcccgcttctcttttcttttattcaaatatcaccgtatcatcccgcagtttcttaatctttagaatctttggatgaaatttccaggataaggcggtcgatgtcgtcgagcttggaagcataatccgaaaggtcagaactgttcttttccttcttatcggaatccttcctatcgtagtagccgacatattcgaccggctcttccttattctcagccgcttcaacctgttccataattttctgcgcctgcagggtttccgggtcctgcgccgtttcgctcaggctctgcctcaggttttcatgcgtttcgggcagggtgcccgctgtttccgcctccgtttccatctcggcttccggcgttttttcctgcgcttttgcggtaagctctaccaggaagaagataataaacagcgcaagggccagatattcaaatatctttatattggaaagaaaatgcaccggttgtccgctgtgaaccacagacgaaacccacgcgcccgtataggcaaatacgaccgctaccgcgggaaggccgtacaaaaagcacgctttgaccggatttttgcttttcagcccgatataaagcattgaggcgttatagaggaacagcgtcgtaaacaccatatatacgagatcggacatatcaatcgcgttgaccgatatagtcgtatagctcaaaaatgtaataatcagccgcgcggcgctccaaatggtcgggaacagcatcaaaaacggcacctttttcgcaaggttatttcccgtcagggaggaaaggcccatgacaaaaatcatcacgccgcccagcacggtaaagacgccgttgataacagccaccagggcgttgccggattcagccatccctttgaagagcataaaagcgtccgtaagcagcagcacgcccgacagcattccaaaaacaccggcgaaaatattgcgccccgtccggtattcgggggacgtttttttatctgcggcacatagcaccgcgagcagaatcactaatagaataatgcttccgacgaaaatcagggaaattgcaccgctgtcaagaaagcctttatcgaccccgctgtcaacaaacagcacctgatatactcgtaaaaacaccgcagcaaacacaatggggatgaacggaatccatgataacttgctcttcattgtaaaaaacaactcctctattctaaatcggccagccaagtcataaaaaaatgccgcggcatatataaataaaacaggcctgtctgattatggtcaaatccataaaacaatgtaaattatattttagttcaaatctcttcctatgtcaataaaaaccatccgttcctgaaaggatttacaaaaaatttataaaccgcccagcgtaaatcttcgtacattatgcgcatcacttaacgcaacaaataaggaaagaaaagggattgtaatgaaaaagatactgattaccgcgctgctgcttgtcctcgtcatggccgccgtccccattgtcgccttaaaccgcctgcccgaacccggcgcaggcgcgtcctcccaaaagccgccggctggcagcagcgccgcttcagaaaaaaacacgtcctcaaagagcacagcctcagccgcatctgaaaaggaaacacagcctgtatcctccaaaacggcggaggatacaaggccgcagtcccaagcggagtcaaagcctccctccaaggcggaaaagcagagcttccgcgtgcttgacgaagcgaccggaaaaatagaagaaatagccgacaaagagttctgtgtcggcgcgctcgccgcggaaatgcctccagcctttgaaaaagaggcgctcaaggcgcaggccgtcgcgctctatacccacttcagccgactgcgcgaggcggagcgtgaaaacccggacaaagcgcttaagggcgctgattttaaggtcaacagcgaaaaaaagcagggatatcttccaaaggacaaaatgaaagagcagtggaaggacaccttcgacgattcctataaaaagctggcggaagcggtaaacgccgtctttgcccagacggttacatacggcggaaaactaatcaccgccgcctactgcgctgtttctaacggcactacggaaaccgccaaaaccgttttcggcaaggattatccctatttgcaaagtgtggcaagcccctgggacgcattgtgcgacggttatctttccaccgtcacctttacgcagaaggaggtagaggacatcataaagaaaaagtgggacgacatcaccctcccttcctccccgcaggaatggttttccgatataaaaacgacggacgcgggaacggtatcctcgataaaagtcggcgataaaacgattagcggtaaggatttgcgggaagccttttccctgcgcagcgcaagctttgacgctgtgtataccttagacgcgtttgtatttaccgtgcgcggatacggccacggcgtgggcctgagccagtatggggcaaacgaaatggcaaagcagggcgcgggctataaagaaatactcgcctggtattatccggggacaaagcttgcaagcgtgtaacccgttctctgtaatccgtaaaaacggtaaaaatatagttttccagaatgaagcggctgtaacagtcatatttttatagcgacaacttaaggaggttttgccatggaattaccaaaatgtcagtccaatctcccctatccgccaatcaaaccggaatgtaaaaatcccatgtatgcccatgccatgctcagcaacatcggttccgcaaattccgaaatgaccgcaatcagcctttatatctacaaccgtttcgtaacagcccaaaaggatgatattgcgcaaattttccacaaaatcagcgttgttgaaatgcatcatctcaatattttcgggacccttgccgtacagctcggcgccgaccccaggctttgggcgcagataaaccgccggatggtttattggacgccgcagtataaccattacccgacagagctcaagccgcttctgcaaaattcgctcagcggggagctcaagacaatcgaaaaatacaaaacgcaggcgcgccggattaaggatgccaatatcgtagaaaacctggaacgcatcatacttgacgaagagtgccatgtcgaaatttacaaagccctgctcgcggcctgctgaatacatataaaacaaacggccctcccaaaattccgggagggccgtttgttttatatttcgtttttattacaggtcgcggaatttctttacattgccctttttctttttccccatcatcgatacggcaatcagataaataatgaataagacaagcaccaaaaccgccgcgccgataaaccatggggaggtaatcacatttttaatcaccgccgccccatacacgaactcgctgcggtcgaccgattcgctcgccaccaggttgactgaagcaattttctgtccgccgtatttaatatccgccgtgccgattttctgtcccttggttacgggcgtatcgaccgattccggtacgttcggaacaatttccacagattccttgtcgtcgcccacaggcaccatggtagagtaggagtattccggaacaagaagcagcgtgtccttattaaacgcataatttaccttagtttcgcagacgggcgtctgttcgcccaccaccttcttaagcgccaggttgccaaacgcccattcgtaaagctgcttggaatcgagcatcgcgccgttgtcggcggaattgccgtccttatcgtagcagggcgcgtgcattgctacgcacaggtatgccacgccgtcctttacggcggtggaaatcaggcagtagcccgcctcgtccgtcgttcccgttttaatgcccttagcatactcatagtaatattccccgcccctgttcgggtcgatgagatggttcgaggtcacaagcggctcgtcatcgtccgggtctatgtaatatgtggtcgtgttgcagatttccataaaatgcggcaaggaaatcgcgtactgcgcaattttatacatatcgtacgccgtcgtgtactggtttgggtcgtgcaggccgtgcgggttgataaaattcgtgtccttacatccaagctccgcagcctttgcgttcatcagctccacaaagctctcgacgctgccttttccgacataatcgccgagcaccagcgccgcgtcgttgcctgagcttaccatcatacagtaaagcaggtccagcacgctgagctgttcatccacatggtactccaagccggaaagcgagcttcccgtcccgtctaaacggtccagaatgtcctgctgaattttaacttttgtgttttccaaatcctttacctgttccgctacgacaatataggtcatgatttttgtaacggaggcggggtaacgtttttcccgctcgtttttctgatagaccggcgtgtccgtatcgaggtttacaagatagatggaatcagatttcgtttcaaaccccgggtcaaagctcgcggccgctgcggacggcagggaaacggccagtataacgagcgcgaggagaagagacgttatatatgttaactttttcatcatagaaaaattcccctttatatgttaaacttagattattgtattatcatacaataaaagcgcgtggaattcaaattacaatcttgaaaaatttactctttgtataatctgcatataaaaggagggggccttatgaggatattgcataccgcggactggcatctgggcaaactggtttacggcgtttccatgctcgaagaccaggaggcttttctggaagaaacgctgtaccccgtaatcgagcaggaacggccggactgccttgtgctttccggtgatatttttgaccggagcattgcgccgccccaggcaatccgcctgttcgaagcgtgcgtgctgaagctctgcaaaacataccggctaccgcttctcgctatctccggcaaccacgacggcgcggacaggattgcgcccgcggcgcagcttctgcgtgaacagggcgtatatattgcgacgaaaatcgaagacgcgttttccccaatagcgcttgaaaaggatgggaccgcgtaccatttccacctgctcccatattttgagcccgccgagcttcggacatactataaaaatgaagaaatccgcggtttttccgaagcctaccgcgccgcttccgggcatattgcgcagggctttgataaaaaagcggtacatatcctctgcgcgcactgcttcgttacaggctgtaccgtaagcgacagcgagagcccgatatatgtcggaggaagcggcgaggtaagcgcctccctgtttgaaccgtttgacctgacgctgctcgggcacctgcacgcgccgcaaaaggcgggagaaaacgtcttttacagcggttcgccgctgaaatattcgtttgacgaggagcaccaaaagaaatcgctttccattatcgatatcgaagggaaagattatgaaatcaggcggattccggtaaaggcaaagcacgatatgaaaacgctcaccggaagctttgacgggctttgcgaaaagggttgtcaaaagaaggacgacgattatatttttgtaagtcttacagacggccgccccgtttatatgccagtcgacaggctgagggaatattacccgaacattctggggctcaagagcgaatttttgtcgcgtacacaggcaaaaagtgaaaagaaaatcagccggactagcaccgatgaagaaattttcaatctttttcttacacaaatctgctcgtccgaggccactgcgggcgaccgggctctctttttgcaggcaatgaatcaggcgcgggaggaaagcctatgaaaccagaaaaacttattatgcagggcttcggcccgtatctcggcataacagaggtggactttacccgcctgggtaaaaacagcctgttcctcattaccggggcgacgggcggcggcaaaacgacgattctggacggtatctgttttgcccttttcgcacgggcaaccggcggcctgcgcagctggaagcagatgcgcagcatcggcgcgccggatgacacccctacccttgtcgattatatcttcaccctgggggatgcgcgctaccgttttacaagaagccaaagcgtatatgccgcgcgccggaccggagaacaaaaaatcaaggaagagcacgcctgttaccggatggaaaacggggagtgggaaatcctgctgtcaggcgcggaaagcaaagtagcgcaatgcgcccaggacctgctggggctcgattgcgagcagttttccagggttattatgctgccgcagggtgagttccgcaggctgcttctctcctcctccgccgataaagccaaaatatttgaaaagctcttttccacacagcgctggtcgagggccgcggacattatcaccgcgcaggctaccgcattacagcggcagatggaggatttgacgctcacgcgccgcgccgttctggagcgggagcaggttgaaaacacttcccagctcgaggaaaaggaagaaagcatacgcctttcttatgaaacggcgctcagggaggcgcaaaggctggaggaagcggcggataaagccgaacaggagctgaaagcggcacaaaaaataacggaataccaaacgcttttaaagcagcaggaacaggcgcttgacgcggcaaaagggcaattcatgcaaagcaaaacccattttgaaaacgcgcagcggcaggcgcaggaaatccccatgctcaaggagctgcgcgaccgcttgctttctgaaatccccaagctggagtcggcttataaaagcgccatggaggcacaggcgcttcgcaaacgcgccgccgcgctcgagctggagcgggaacaggtaaaaagcatgcaggagcaagcgcaagccgcagaaaggcaggcgcaggaaaacacagccaaaggggaagcgtacctggaacatttaaggcgggaaatcgagcggattcccatcctgtttacaaaataccagacgctgtctgaaatcgcgcagtcctaccaaaagctcggcgaactgaaggcccgtctcgattctgcgcagaaggaaacgcggcaggaacagggcaagtgggaagagaataaaataagcctatgtgctttgaaggacaagctcgagcaaacaacaaggcagattcaggagaatatggcgttcatgctttccctggcgctcacagacggcgcgccctgcccggtctgcggctctatgcaccatccctctcccgcctgccggaacaacatgggcttgaatgaattgcagcagcaggcacaaaagctcggaacgctcgtcaaaaacgccgaaaaggcggaggaagagagtaagctgcgttttctggacacgcaggcccgcctcgcccaaatacaggatgagctgtcccgtcagcaggcggtatgcgacggctataatatttactataaagcctttgtacgcgaccatgaaaaggcaaaaaaagagctggaagaggcgcaggccctccaggaaaagctgccgcgcgcccaaaagctgctgcagcagcggcgaagcgagtacgaaacggcacaaaaaaagatggaagcctgtaaaacacagcgtgaggaaatcacacgccttctggaaagcttaaacggcgagctgcgcgcgcttttaaaatacctgcccaaagacggaacggacccgcaggagcttgaggcgcggcttttggctgcaaagagccgggaaaaagacgcggaagacaaaacggccgccctgcagcaggcgcttgcgcaggcggcacaaaacgtccagctcgcgcaggcaaagcttatggatgcgcaaaagctgctggagcggacgcaaatagaatataatacgtttcttggggagcataagggaaccgaccctgaacgccttagcgcttacagcagcgcgcttgcccatgcaaggcaggagcaaagggattctcttgaaaaaacggggcggctgcagcaaagcctgtcctccgtgcggcaaagccttacccatcttcaaaaatccgacgaagcgtcagaaaaggtacagcaaagcttcggtgaggcgcagcgcctgtctaaattcctatccggcgcaaacccgggcaaaacaccgattaagatgttcgtgctcggtatgatgctcgacgatatcatcatacaggcaaacgaatatttttccgtattctcaaacggccgctacagcttaagccgaattttggaaaacacgggcggcaacgccctcaaagggctggatattgaaatttttgacgcatacggcggcagtacgcgcagcgtatatacgctttccggcggcgagctgtttctggcctcgctttcccttgcgttcgggctttgcgacgtcgtacaaagctattccggcggtgtgcggctcgactctatctttatcgacgagggttttggcacgctcgaccgggaaacattggacacggcgctcaaagcactcgaccgcatcaggagcatgggcaggctggtcgggattatctcgcatgtttcggaattaaagagcagaattggtgcaaaaatagaggtgctcccctccaaaaagggaagcaccgtcaaaatcgtcacaccagattaattcaaaccgttttcgcccaccctgccgaacagacggcgtatctcggcgcgcaggctcctcgcggcgccggtcgacaggtccgggctttcctccaggattttctgcgcagcctgctgcgcggcgtcaaggccgtccatatcggtcaaatcggcaattttaagctctggcaagccgtgctggcgcgcgccgaaaaagtcgccgggcccccggagctttaaatccatatccgcaatttcaaagccgttgttcgtctggcacatggtgcgaaggcgggcgacggtttcttcattctgcgcgtctgaaatcaaaatacaataggatttatactgtcccctgccgacacgcccgcgcagctggtgaagctgcgaaagcccgaagcgctccgcgttttccaccgccatgacgacggcgttgggaacgtccacacccacctctatcaccgtagtggatacgagcaaatcggtatccccgtctgcaaacgcgcgcatcacgcgttccttttctgccggcttcatttttccgtggagcaaaccgatacggtaatccttaaattcgaacttttgcagctcttcggcgtattcctgcgcggaagctatctgtaattcgccctcctccaccgcgggacatacgatgtagcactgccgcccttcgtttatgagctttttcataaagccgtacatacggtggcgctttgcgctgtcgataagcatcgtatcgaccgtctgcctgccgggcggcagctcgtcgataacagaaatatccaaatccccgtaaataatcagggcaagcgtccgcgggataggtgttgccgacatgacgagcagatgggggttctccccctttgcaagcagctttgcccgctgcgatacgccgaaccggtgctgctcgtccgtcacacacagccccaggcggcagaattccacgccgtctgaaatcagcgcgtgcgtaccgataatcaaatcgatttccccgagcagcaggctttccctgattttccttttgcgcgcggcagtcatggagccggtaagcagctccacccgcacgccggttccttttaaaatcccgcttaaagactggaaatgctgctccgccaaaatttcggtaggcgccatgaaggccgcctgccatccgtttttcgcggcgcaatagcaaagcgccgccgcgaccgctgtttttcccgaaccgacgtcgccctgtatgagccggttcatcggcgggccgcccgtcatcatatcgcgcacgcagtcgcctgtggcgcgcagctgcgcctttgtaggccggaacggcaaaaggttaaaaaaatcccccgcgtagtccttttgcatcacaatggatgtctcgtttttcctgcccgccttaaggcggcgcaggccgaggtttaaaattaaaagctcttcaaaaacgagccgccgccgcgcgtccaaaagcgcctgttcgccttgggggaagtggatattttcaattgcctcccgcaggccgcagaggttgtattttttcatgatatcatgcggaatcggctccttgaccttttccggcagcagtaaaagcgcgcgctccaccgccgcttctatctggcgggaggatagccccgctgtcgcgctgtatacggggcgcaccctttgcccctgctgtgccggggagaattccggcgcggtcatttccttccggcctgtgccctgcgtaattttaccgtagaaaatatacgtttcccctggttttaacatatttttaatgtaacggttgttgaaaaaggtaagcgggagcgcgccgctttcatcgtacacgcgcacacgggacaaaagccttccgcccgctatgcggcgctcgttcaccggggcttcgaccgtcgctttgatgcagcagacttcgttcgcctgcgtttgcgcaatcgtcacggggtggctgtggtcgacatagccgcgcgggtagtagcgcagcagctcgcccacggtacgcacgccgagcctgcggaaaagctcgccgcgctttactcccacgcccgaaagcgtttcaattggtttttcaaacaacgacgccatcggggcatcctccgtttctttaattcataatatggctttgccgccccgaaggcggcaaaagctgggaaaagagctgatgacacggacatttcaatccgcgcttcccgtgtgggaagcgactattacgggcgggctgtccgatacaacgcttgaatttcaatccacgcttcccgtgtgggaagcgacagcaaaagaagctgaatttgcacgggaaaacgcatttttcctgtacaaaacattcaaacaatgcttcttttcttatattctatcataaaaatacagtatttcaaactgtttttccggtgcgaacctcccagcggttttctgtttgcttacggttcgcacttttcggcaatacaagcattgtcataagggctttaccatgataaaggtatccttatcctcccggacagcttcaaagcccagccttttatacagcttgaccgcgcggttttctttttttgcactgagcatcgcctgttttacgccgttttcttttaactgttgcagcagcgcgcacagcaatcgggtaccaacacctttttccctgtattgctcgtaaagcgcgatggaaagctccggtgtaaattcatcgataaactccggccccatctcttccttactataaaaccgcgcccaggcggccccgcataggacgccctcccgctccgcgacaaagcaggcgtctccctttctgccgaagccgtcgatatagcgtgcaagcgaaggcttttttataatatcacgcgggaagggcttctccccttttgggacgaacagcgcctggtacagcatttcctccagaaaagcgtattccctgtatgctatctccctgattaccatgcgaaacctccttattatcaagaaaatataaaaagggcggccggagccgccctgcgttcgataaaatttggtttactccacggaaataatgaagtagtaaatcggctgtccgccgtttacgagcgtgacgtctacgcttgagccgtactttgcctgtacctgtttcagacacgcctgcgcgtcctcatcggaaacatcctcgccgtaaatgatggtgatgaacgaggtatccttcctgaccatgctctttgtcagcttatacgccgctttaaccgggtcgtccttgtcggtaatacagagcttgccgttttcgagcgcgataatctcgccctctttgatttttgtgctgccgaattcagagtttctcgcggcaaacgttacctgcccggtcattacgcccgaagcagcgtcaagcataagctgtttgttgccgtccgccgtaaggtccgggtcgtaggcaagcattgcggaaagcccctgcggaatcgtcctggttggaagcacgacgaccttcctgtcctcgacaagcggtacgacctgctccgcagccataataatgtttttattgtttggcagtacaaataccgtctttgcaccggttgccataaccgcttcaagaatatcgtccgtgctggggttcatgctctgcccgccgctgacgacatggctgcagcccaaatccttgaacagctcggaaaggccttcgcccgcggcaaccgcgacaaaaccgatttcctcttccggcgccgcttccgcaagcttttcctttttctttatatgcttttgcttttcctgctcgttttccttcgcggccttgtgctgctccttcatgttttccaccttgaccgttagcagggagccaaactccaagccggcctgcagggcgttgcccgggtcttcggtatggacatgcaccttaatgatttcgtcgtcgtccacaaccacgacgcagtcgccgatggattccaaataatggcggaggtcaacgggctgtttttccgtctgcttctcgcgcccgacgatgaattccgtacaatacgtaaagcggatgtcgtcgtcaaattccgcggcggcgctgcggaagaagtctgattcttccccttcgccgtcattcttttcttctttatattcaattacaacgccgtctttaaagacagacatcattccttcaaaaattacgcaaaggcccttgccgcccgcatcgacaacgccagcctttttgagcaccggaagaagctccggcgtggtgagcagcgcttcctctgccgctttacagatgacgtcccatacggcgaccgggtcgtcgttttcctgcgcatacgccttacctgcttcacaggcgaccctcgcgacagttaggatagtgccttccgtcggcttcataacggcgccgtaagcggactccacgccgatggaaagcgcgtttgcaaggtccaggccggatgcggcctctttgccctcaagcccttttgaaaagccacggaataagagcgagaggataacgccggaattgccccttgcgccgcgcagcagcgcggaagcggctttcttggcaacagcgcctacgctatcggactccatcttcttaagctcggcagccgcggcgccgattgtcatagacatattggtacccgtgtcgccatccggaacggggaatatgttgagatcatcaatcgaagacttttgagaggtgatatgattggcgccggatataatggcgtcctttaaagacacgccgttgaccatacaaaacacttccttaatagagaggcagcaggtaaactgccggtatcacgcatttaagcgtgctttttattatagcatagttcagtgcggaatttcaatacatcgggggaaatatgggcattgttcacaacccattgcagcatccccgccgtatgcggcggcaacatgctcacattatttccactcgttccaccgacagggctttccccgtcttttcatcgatttcaaacaggatgcagtcgagcttgcagtcgccgcttgccaaatcgaaccgctgcggcagcttatccttgagcttcgcgatgatgatttccgtcttgacgccgagcaccgaatggataacgcccgtcatgcccacgtccgtaatataacccgttccatttggaagaaccgtttcgtccgcagtcggcacatgcgtatgcgtgccgtacacacctgaaaccctgccgtcgagataatagccgaacgcgcgtttttcgcccgtcgcctccgcgtggaaatcgaccagtataattttcgcgccctgctcccttgcccgttctatcagcctgtcagctgtttggaacggacaatcgagcgcttccataaacgatgtgcccataatattgagcaccgctacctgcgtccttcccatgtcgacgatacacattcccctgccgggcgtcgtaccctggggatagtttgccggacggactaaatattcacattcatcatacagcgtataggattccttcctgcggaaagcgtggttgccagtcgtaatgacgtctacgccgctttgaaaaaggaattccgcgctttgcggcgtaatcccattgccgtcggctgaattttccccgttcgcgattacgagctcgaccgccttgagctttttaaattggctgagctttttacgcaggaattcacacccaacgcttccgaccacatcgcctattgcaagtatattcataaattccacccttaatttatattatcggcagcaattgccccaatattatgctacagttattggaaataataaaattgacagcatgccgttccatctgccggccggctgtcatcaaacagcttccctctctacaaccggcacgccgctgcccttgaaaagaggcaggacttcccgctccaaatcagcggggtcaatatcaattgtaaggtcaatcagagagccgtcttttaattttaaataataataaggcccctccatccatatgccaaaatcgttgtattctccagcgtgatagaagcattcttccatttccgcataagggacctgctttgcagataaagagaagaattccctttggtcaagcatgccgttttcgtaaaagctcagcccgcaatttacataaagcgcgaggaaaactatgttcagcgcgcaaaagaccgcaaagaatgctttcatccccctgccgcttttggaagaatttaaaattgcatcatagtcaagctttttccggtaacgctttttatagaaaatccggtatgctttttttctggaaaaatacgagaaaaacatcgaaaagataattgacagaggaagcagcacgagcgtgcggtaccattgtgcgctcgatgcgaaaagcgcgttttggtacatcaggcaaaccataccgtaataaagcgccgacagcaccaggacaacaggcggtatgaacacaagacaggccgtgaaaaagggtaataagccattattgccgttttcctctttgaccccgtccgtaatcgaatcggcctgccgctcgaccgcctgataacgttcatggggcggaaggcttttcatgaattccagcaggcgttcttcatatggcgtacgccttttgtcctttgacagcagccggattgcttttttatagttcccttttaagaacgctgtataatacccctgtgtcaaataacgcagcttggcccaatcgtagtaaccagacagggcgccgtccaggaatacgccatccagctccttattgcccgtagaatcctgtttaaaaatttcactgtcgtaattctccataataaaacggcgctgcccgtcgtacagcttttccacaagcgtactgtcagccgcaagttccgaaagcctcggcagatatttcttcagtgcctgcgcgagcacggtgaagcaggcttccatacgcgcttcattttctatataggaaaacatatagcagtggaaatcatgttcatcaagcagatgcattaaatcatacaaatagaagtaaatatgttcctctccctttataagcctaatcctgcattccagaacacttttaagcagccatcccattccccggtatgtataaacgaattcgagcaaaaaaccgttataatatattcttccgatgctctgcttcggttcttcccccgcggcctttattttttctaacaattcataggacagcggccctgtttcccgcgaaaacccttcaacgcaggaacgaaagcatttgacaagcttttcaacatgctcaaccggattttgccgcatttgtatctccccaatccgcactgtttttttcgatttgcgtaaccggaatacccttctcctttaatatgggaagcagctttgcttcaaattcctgttcagacatatagtcgctcagctccagtccgccgttgcttttggtcatcaaggcaaattttttaaattcgcttccgtctgtccggcgtccgtgcaggacgagcacctcggtaatatccgcataggagcacgagccgcccgaaaaagcgccgcgcgcggaacggtttgttaccgtatcttcatagaatgcaatattattgtttgcgctcattacggtaaacaaaaagctcacaacaaccgcggcaaccgtaagaacgcccatcatgcgaaacgccgtgcctgtgtttaaaatcgcgtcgtactcaatcaaatgctccgcgcgctttctcagcacaagacggtaaagccttttcctgaaaaagaacgtcagggcaacaccggtcaaaagcgcaggcaggataagcggcgcggtgtggctccattcgattcccgtcacatagagcgccccaaggtttaacaggcccagcgccgcgtaatatacgccggcatagacggcataaaaggccacagacaatacaaggcttgagataatcaaaggtacgagccccgccctgccttttgacagggagcctgcgtctgtgagcgcatttatatgctgtttgttcgccccatcgggctgctttagcgcggtatcccgcaaaaaagcgagcaggcggttttcataggaaagcctttttttctgtttttcataatgcctctgcgcccgttcataatcgccggataaaaacgcgcggtatgcttcttcgcaaaaacgtttgcgctcccagtcgcggtacattttcagacggttttcgataatcgtttcccggcgctcctcctctattttctgctccacgtcgaatagcgccgggtcccagcagtttttgatatcctccaaaagcttctgctgtgcccgcgcgcacaaatcggggtcagcggcaatttggattaagcgcggcaggaaacgcttcaaattaccggccagcgcggaaaagcagacatccatccgctgcgcgttttctatatagggatacagaaagcaggaaaaacagtcctggtcaatcaaatccatcaagtcataaagcgagtagtaatgctgcagcctgctttccgcaagccagacacggcattcaagcacgcttttggggcctccctgatcggttttcaccagataaacaagctccaggacaagctttccgtaatgcaggaaagccgcagcggcggccggttccttgtgctctttatcaaaataagcggttctggtatcacaggaaagcggctgcgtttcctttgcaaacgcgccaatgtccgcttcaaacgcctctataatgcgcgtaatatatatattttctctttttttcattatggaaggctccttccgggtgttgattttatcgttcgcctatgaaaccgattttaacatacccgggcatagtaagcaacgaaatacgcccgattttctccaaataacaaaaacgcgggcctgcgcaaattgcgcaggcccgccggataccctgttatgcagctcagccgtcaagctctttcgttgttttgacatactcgaattcttctacgatttcctgcgacggcttttttgtaagcaggctgacgacaatcatgccgacgagcgccagtgcaaagcctacgaccaaggaataaaggcccgttgcctctcccagcgtctggccgctgacgattggcaggtaatcccaggcaagcaccgttgcgccgcctaatatcatgcctgccgcggctcccggaaggtttgagcgcttccagaacagcgacagcaaaataaccggtccaaacgccgctccaaaaccagcccaggcgtttgaaacaagccccataacgctgctgtccggatcaagcgcgataaagaacgcgatgactgcgaccgccacaaccgtaatacggctgacaagcagcgcgtttttgtcgcttgctttcctgttgatgacgccgcggtacaggtcctccgaaacagaggatgaggtgacaagcagctgtgaatccgccgtggacataaccgccgcgagaataccgcacagcagaagcccgccgacaaacggaagcgcccattcgttgttgaagatttccataatcatcttgataaagacgttctcggattccccgtcgggcaggattccgccgagatacgcctttccgacgacgccgacaaagcaagccgccgccagggaaatgacaacccaaacgattgcgatgattctcgattttttgatttcaccagtggaacgcaccgccataaagcgcacaaggatatgcggcattccgaaataaccgagcgcccagccaaggttagaaatgatggagacggccggcatcggctcccccttcgaggtaagcatggggttgaggaatcccgaaacgctctctaccccatgggacgcaagcccggcagtaacgccgtccgccccgccgatgaggaagaacgcgacaatcggcactaccatgagcgccgcaagcatcaaaaggccctggataaaatctgtaacgcatacggccttaaagccgccgaagaaggtgtaaatcagtataacaaacgcgccgattgcaagagcaaccttatagtcgataccgaatacgttgttaaaaagctttgcgcccgcagtaaacgcagatgccgtgtaaaccaaaaagaatacggtgatgaacacggcggagatgattttcagaatcttcgtcctgtcgcggtacctgttctcgaagaacgacggcagcgtcagggaattgcccgcttttattgtatatttgcgcaggcgcgaagcaacaaggaaccaattaagtaccgtaccgatgagcaggccgatagcaatccagatttcgcctgtgccggccacataaattgcgccgggcaggcccatcaataaccagccgctcatatcggacgcctgggcgctgagcgctgccgtccagctgttgaggcttctgccgcccaggaagaagtcctccgagttttttgtctttttgaaatagacgaagccgatgattaccatgaccagcaggtaaaccacaaaggccgcaagcgtccacaacgtttcagacattctaccacttctctttctttattcggattgtgttctcatattttgaaaaggccgttttcaataagaacactgaaacataaaaataataacaaaaattaacatgaaatgcaagtttttttcacactttgcatttatcaggcggacagtttccaaacaattgacttaaacggctgcggggaatataattaatatttaaaggtattacatcagccggaggcatagaatgaatagttttgtaaaacgaacctgggcggaaatcaatcttgacgccgtcatacataactacagggaaatccgcagccatacggataaaaacgccatggtctgctgcgtggtcaaggctgacggttatgggcacggcgcggtcgagcttgcacgggtttatgaaaggcttggcgcagattggtttgccgtatcgaacattgaagaggctatggagctgcgccgcgcgggtattgtgcttccgattctggttttaggctatacgccgtgcgactgcgcagggcttttgagccgtgaaaacatcgcgcagacagtgtattccacggactacgcgcaggagctttcacaaagcgcccgaaaggcggacgtttgcgtcaacattcacctgaagctcgatacgggcatgacgcgcatcgggctgatgtgccaaagctttggccgcgacgacacgtcgattgacgaagccgagaaaatctgtaaaatgcccggccttatcccgcagggcgtgtttacgcatttttccgtttcggacgaggcgcaggacggcaaggattttaccctgcaccagtttgactgctttatgcatgtaattacagagcttgaaaaacgcggcattcattttgacatccgccactgcgcaaacagcggcgcggttatcgattataaacaaacacatctggatatgataagggcaggaatcatcctttatgggctgtccccttcgcccaagctcaagggcaggctcgacttggttccggcgatggagcttaaatcggtcgtttcgcatgtaaaggaagtggagccgggcgccgacatcagctacggcaggacgtttacaacacaatgcaggatgaaaatcgcaaccataccggtcggctacgcggacgggtatatccggaccctcgcaagggaaggaagcgttgcggtacgagggcagcgcgcaaagattatcggcagggtctgtatggaccagattatgacggacgtgacagagattgcaaacgtaagcagaggcgacgaggtaacgctgttcggcactggaagggacggtggcccgacggctgacgatattgccgcctggtgcgggacaatcaattacgaggtcacgtgcctgataggaaagcgcgtagcgcgcgtctatttaaaggatggccaaattgtgaacgcaaggaccctcgcggagatttaacagaaggaacaggcgcgcggcgtttcccctctgcgtttcggcgcctgcacggcgcataagcgccgcgtttgcgctttgcgcaaagaacgcccggcatgccgggcggaacaggcgctgcaggcaaggccaatatgtttaggagaattgaaaatgaagcttttggtaatcgacggaaacagcatattgaacagggcgttttacggcatcaagcttttaacgacgaaggacgggcactataccaacgctatttacggctttttaacaatgttccgtaaaatcagcgaggatacggcgcccgagggcgtggctgtggcgttcgatatgcgcgcgcctacgttccgccataaggaatacgcgggctacaaggcacagcgcaagggtatgccggaggagcttgcacagcagctgcccgtgctcaaggagctgctgacactgctcggctataagattgtggaatgtgaaggctacgaggcggacgatattttaggcacgcttgcagcctcctgcgaaaaatcaggcgaacagtgcgtcatcgcaacaggcgaccgcgacagcctgcagcttgtatcagaaaacgtgaccgtacggcttgccgctacaaaaatgggacggccggaggtcacggtatacgatacggataaaatcaaagaaacctacggtgtggagccgaagcagctcatcgacatcaaggccatccagggcgacacgtccgacaatatccccggcgtcaagggaattgggcaaaagggcgcggcggaactgattgggcggttccacgaccttgattatatttacgaaaacattgatacgctcgatattaaggaggggatgcgccaaaagctgattgccgataaggacaacgcctatttgagccgtcgtctcggggaaatttgcctatgcgcgccggtcgatacagagcttacacattatacgccggaaccgggcaatcccgctgccgccgccaggctgatggcaaagctcgagctgttttctttgatagagaaaatggggctgaaaaaagaggatgctgccgtaccagcggaaaacggcagggaaaaacccattatccaggtgaaaaaaacagaagattacaaggcgcttttatcccttttgcaaaaagagaaaaaagcggtgttcgtaagccaatttgaacagggaaaaatcgtagctgccgccttttcagccggaaacaaaatcgttattgcggaaaatacagacggatttgtccccttcctgaaggatttgtttgaaaacaaagcaatcagaaaacagacacacgatttaaagccgctctttgcggcaatcgataagcaaggtattacaatggaaaacgccgattttgacacgatgctcgcggcctacctgttaaacccggctgcttccggctacgatattacgcgccttgctgacgaatacggcgtacaggcgccccagctttccggtgcatcagaaggaacgcaggagcttgctctgtgcgcggcgctgctgccgggcgtcattgagaaaatcaatttaaaaatagaagcgaacggccaggaaaagctgctgcgtgaaattgaaataccgcttgcggacgttctggcgcatatggaaaacaccggctttatggtagacgccgaagggataaaggaatacggcggcgcattggaggaaaagcttctcgaaatacaaaaccaggtctatgaggaggtcggctacgaattcaacatcaattcgccaaagcagcttggaagcgcgctgtttgaaaagctcggcctgcccgccggaaaaaaaacaaaaagcgggtattctaccagcgcagaggtactcgagggcctgcgctacgaccatccggctgtcgcgctcgtgcttgaattccgcacgctttctaaactcaagtccacctactgcgacggtcttttaaaggtcgtgggcgaacgcgggcgcatccattccagctttaaccagacggaaacgcgcaccggaagaatcagctccacagagccaaatttacagaatatccccgtgcgcaccgagcttgggcgtgagcttcgccgcttcttctgtgcgaaggagggctggatgctcgtcgacgcggactattcacagattgaattgcgtgtgcttgcgcacatcgcggacgacaaggtgatgctggacgcgtttaaaaacggcgacgatatccacgctatcacggcctcacaggttttcaatatgccgcttgagatggttacgccgattatgcgcagccgcgcaaaggcggtcaatttcggtatcgtatacggtatcggcgcgttttccctttcaaaagacatcggcgtttcacgcaaggaagcgcagaattatatcaacgcgtatcttgaaaagtacagcggcgtaaatgaatatatgcacaggacggtcgaaaaggcgaagtccgacggatatgttgaaacgatgttccaccggcgcaggtatttgccggagcttgtatcgagcaaccacaacctgcgcgcgttcggagagcgagtcgcgatgaacatgccaatccagggtaccgctgcggatattataaaaatcgcgatgattcgtgttcagcggcggctcgaacgtgaacagctgcgcgcgcgcctgattttgcaggtacacgatgagctgattgttgaggcgcccgccgacgaggcgatgcgcgtcgcgatgcttctgcaggaagaaatggagcatgcggcacagctgagcgtgccgcttaccgcggaggcttctgtcggtcagacgtggtacgacgcgaagggatgacaaaaggaaggatacctctatgaaactgttatttgtttgcacgggcaacacatgccgaagcccgatggcacaggcaatttttactgatatggcaaaggaatgcgggattgattttgtaaccggcagcgccgggcttcacgcgcaggacggcacacccgcttcagaatacgcggtgctcgcctgcggggaaacaggcctcgatataagcggccacagctcaaaatccatccgcgacgaggatttttcctccgtcgatttgtttgtcgttatgacaatggcacacgcccaggcgctgatggccatgggcgtaccaaaaaacaagatttatattctgaatgtcagcgacccgttcggcggtaatttacaggtatacagggattgccgtgacgaaatcagggacaggctgattatcctgctggagcttatcaaacggcaggaacaaggtgaatagcttggacggcctgcgggttgtccccatgcgccaggagcatctcggggcgcttgcggaaattgagcgcctctccttttcaaagccatggagcttagaatcgcttggggcagagcttagaaacgaaacggcgcatttttttaccgcggaattccatggggccgctattggttacataggcctgcacacggtatgcggcgaagggtatattgcgaatgtcgcggtacatcctggctacaggcgcaagggaattgcgcgcacgctgctgcagcatgtaaaagaatacgcaaggcaaaacagcctttcgtttttaacccttgaggtacgcccgagcaacgggccggcagccacgctttaccgctcggaaggttttttggaagcaggcaggcgaaagggtttttattctaacccgcgcgaggacgcgctgattttaacacggaaaatggaataggttggtgaacacacatgaagctgcttgcaatagaaagctcctgcgacgagacggcggccgccgttgtggaggacgggcggacggttttgtcctccattgtcgcttcccaggtagaagagcataagctgtacggcggtgtcgtgccggaaatcgcgtcccgccgtcacgccgaggcgattacgggcgtgacggcggcggcgctcgaaagcgccggatgtaccttgcgggacatcggcgcgattggcgtaacctatgcgccggggctcatcggcgcgctgctcgttggcgtcaactatgctaagggaatatcgctcgccacgggcatccctgtcgtgccggtgcaccatctgcgctcgcatattgccgcaaactatattgcccacccggatttaaagccgccgtttttgtgccttgtcgtcagcggcggacacagccatattgtaaaggtagacggctatacaaagatgacggtgctcggtaaaacgcgcgacgacgcggcgggcgaggcctttgacaaggcggcacgcacgatgggtatgccgtacccgggcggcatccatctggacaaggctgcggacggcggcaatgaaaacgcatttttgctgccgcgcccgaaggtggatggcgcgccgtatgatttcagcttttccggcctgaaaacagcggtcatcaatcttattcacaacgcgtcgcagaaaaacgaaacgctgcctatagccgacctatccgcatccttccgcaaagcggccgtcgattgccttacggaaaacttcctgcgtgccgcgcaggacacaagcagcaccgtactggtgacggctggcggcgtgtccgcaaattcccttctgcgtaaaaggcttacggagtcctgcaaagagcgcggcttacagctttatatgccgccgcattccctatgcggcgacaacgcggcgatggtcggcgcacagggctattatgaattccagtctggaaacatagccgacctctccctcaacgcatacgccaccaagtcgattgaatccccttgaattaaaagaaagaaagaaggaaccgacgaaatggttccttcttttttttaaagcatcctgcttttttgaagcaacctacttcttggttttttgagaaacgtcccatttctttttattgaatgaagctttcaaagaaggaccctgtccctctctttttaaagaaaaccatctgcttcttgggttttttcataaaactttatatgtttaatcaaaagggaaaaacaatccgctgtttttcccttttgtaaacccttttcgtcggtacaagggacccctttcgatgggttcccttacggcttacgggcggcgaagcatcgcgccgccctccgcctatccctccgcagccgattcaaggggctgcgccccttacaaaccccacatgatagaagccatgccgttcctcgtttgatgtgcggggtgtagaacagatactgcgggacgtttctgcgccgcgccttcgcgcggagtaccccgtggggttggtactttcttggtatgtggagtgctttgtaagcgctgcttttgcgcggctttcgccggaatggtggtttatacgccttcctcctgcttgtccgtatggtacgctatgcccacgcaatgcgtgagcgtttcttttatctgaccatatgcttttttgatggtgtcttcacgggacggcctgcctccgcttaccgcaaggctgccgagtacaaagctgtgctttagcgcctgccattcttcaggagaaaggcgcggttccccgagcgcctgcatccgctcaaagcagaaaagggcatagcctatttcgtcaagcttccggtagctgaaatcgaggtacagctcttcgcgctccgtttcgccctgtaattcttttccttcggcgcaaagcccctgccggtgcgggtcttccgctatccggtgcaatagcccgtttagctcttccagatagctgttatgtatcacagagaaccccttctttccgtgtgccgtccttccgtaccgcctgtttctcctgtatgcctaagctcagctccaagcataaggcaatcatatcgcagccgctctcaatctccatctggctgccgcaggaggaaaggcttgccgtcaaacacgcaaggcaaaagtaatcttcatattcgcagtcgccaaacggtactacatcaaacgagcggaatacatagaacgccctgcccgcaaaccctattttctcgagtacgtccgcattaagttccgtttcctccaatagctccgaaagcagcttcttttcttcacccataaacatcctccttttagtttacatttattaaagctgtttttaatatccgtaagacatttaatatagaattaaaacagatgcgatacaaaaagtataccctactattagtaggatttcaagaggatatcctacatttagtagtattatgacaataaggagttgattttcatgagagattataacaatttatacagagaaataataagagagttaagaaaagaccataaattgaaacaaagtcagattgccgaggtttgtggagtatcaagcgcgttggtaggccattgggaaactggggttagggatattaatatcaattgtcttgtgaagctagcactatactttgatgtttcagtcgattatattttaggtttatcaaacaaccctaaaaaggggagattcggttaaatctactccctctatccagcagtaacgctctttaaccccgcttgtttatcagctgcattcctgcaaaacagtattttatttattaaatatatgcgagtattttgccctattttgcaggatttaaaaagaaatcattcataacgctggaaaaatagcgggaatttgacaggaaattaacaatttatacattgataatttcagccgtttgtattataataaatctcaacgtcgtaaacccgtcaaagggtagaaaggggaaacaccaaaatgacaaataacaagtccgttctttcatggcttgaagaaatgaaagaactgctcacaccggaccagaccgtctggattgacggttctgaagaacagctcgagcagctgcgcgcagaggcttgctccacaggcgagctgattaagctcaatcaggaaaagcttcccggctgttacctccacaggaccgctgtcaacgacgtggcccgtgtagaggacagaacctttatctgttccaggaaagaagaagacgccggccctaccaaccactggaaggacccgcaggaagcgtataaaatgctgttcgacattgcaagaggcagctataagggccgcaccatgtacattatcccctattccatgggccccatcggctccccgcttgcgcaaatcggcatcgaagtcaccgactccatctacgttgtgcttaacatgtctattatggcgcgcgtaggcaaggcggtcatggaccagctcggcgacagcaccgactgggtcaagggcctgcattcccgctgcgatattgacgcggaaaagagatatatctgccacttcccggaggataactatattatctccgtaaactccggttacggcggaaacgtactgctcggcaaaaagtgctttgctctgcgtattgcctcctatctcggcaagcagaacgagtggatggcggagcatatgctcatcctcggaatcgaaaatccgcagggtgaagtcaaatacgtctctgctgccttcccgtcggcctgcggcaagacaaaccttgccatgcttatcccgcctgagggatacacgagcaagggctacaaggtgtggacggtcggcgacgacatcgcctggatgcgcaagggtcccgacggaaggctttgggccatcaacccggagaacggcttcttcggcgttgcgcccggcaccaacatgaaatccaacccgaacgcgctgatttccacgcagaagggtaccatctttacaaacgttgtgcataacctcgacgacaacaccgtatggtgggaaggcctcgacaaaaatccgcctgagaatgcggtcaactggaagggcgaaccttggaacggcaaaaccgcgaccgaaaagggcgcgcatcccaattcccgtttcaccgctcccgcaaggaactgcccctgcatcagcccggaatttgacaacgtaaagggcgttccgatttccgctatcattttcggcggcagaagagcgcagaccacacccctcgtttaccagtcaaaggactggaacaacggcgtgttcgtcggctctatcatggcttccgagacaacagcggccgcgaccggcaatgtcggcgtagtgcgccgcgacccgatggcaatgctcccgttctgcggataccacatgggcgattatttcaagcactggattgagatgggtgagctgcttggcgacaaggctccgaaaatctttaacgtcaactggttccgcctggatgacgagggcaatttcctctggccgggattcggcgataatttccgcgtactcgagtggattatcgaccgctgcgaaggcaaggcagacgcagaggaaaccgcaatcggttatgtcccgaaggccgacgatatcaatatcgaaggactcgatatcgataaaaagacgctcgaggatatccttgctgtcgacaacgaaaaatggctcaaggaagccgagggcattgaggagttctatacgaagtttggcgataagcttccgcaggagctcaaaaaccagcttgcttcccttaaggaaaggcttgcaaaataaaaaggtacggtttcgtaccctgaatagaagcgccgcgattccctttacagggatggcggcgcttgtttttttgaaatatcaggttacaatgtataaatcaggacatgcgaaaaccaccgggaggaaaagaagaattgtgagcagaaacatttcataaaactttatattgcggcatcctattttccagcttgcccgcgtttgtaatgatacaaaccgttgcggcgcagtaccgctgcctgtcattatcccagcggccggtcctttcgtcatcatattccggcgtttaaaagccgctatctctccgtcatgcattccacgaataaaacctcctatgtaaaaatatagagatatgacaggctcctctctctgggagccgaatttgccattacgctgatttcacaagtatagctgggaaaacgaaacagaagcaaggctggttgaaatgaagccgcgacaccgttccataaaaagaaacagcggcgcggccttcaaataaaaaacaaggggcggcttagaccgtcccttgtttgatttacgattaagattccgacgaggagctggacgcggggttctttccggtaacgctctcttcaaacacaaattttgcaaggtcatagcgctgctgctcccaatcgataatttcaacgattgactgcccgtcggatgtccagccgtactgccagacattatcctccggcaccctgaattcctccatatcgtatttgaggtaggtcagggaattcgcaacaagcgtcgttatctcatttttcttgaggtttgtcgtaatcatcgggccgacttccccaacgatgctcacaatctgcgtaaggttcgcgtttttaaagtccgacatcacgattttcagaagatttctctggcgggatgtgcggtcgaaatcgtcgcccgaaaaaccagcctcttcgtcgccgcggttacgcgcgtaccacaacgcctgcctgccgttcaggtgcacgacgcctggttcgtccgcaagctcgttgcgcgtatcgacctggttattgatataggactgccagttgatatagtcgatttcctcagaggtcagctcaatatctaccccgccgagaatatcgatgatattccgaaagcttttaaaatcgacaaccgcataacggtcaatattgatgccgaaattgctttcaatcgttttaattgtcagctgcgggcctcccaaggtataggccgcgtttaacttattctccccatatggctcgccaaccgagttattccccggtatcgtcacgtaggtatcgcgcataaaggacgtgagcttcagcttcttatgccggttgtctatcgacagcataatcatcgtatcgctgcgcccatgctcttcccccgcttttctgctgtcctcaccaaacagcataatgtttaaaatcatcgggtcgtttaaaagctcgccgctgtttaaatcaagctcagtcggccctgtcgataaagacgaatgagacgaggaggtattctggttgtcgtcaatcgatttgtattcgattgcgttgaccgtattgtacaggacgattaagcccccgccgacgccgcccataatcaggcagagaaataaaacgagtacatttttccagccgaaggcgtgcgcttttttctgtgcgcccggccttgccaccgcctgcctttgatttggttttctggacaaagctcatcgctccttcctttatttcaaaacattccaaaatgtctgtatattatacacccttcaacataggcggataattacattacagaaaaatggcgccattcttgcgcaacgcaccattttccatggcaaaagctgtgcttctttgttaaatttcccacctgaaaactgttttaaacggcgtattcaggtcggttgcgaacacacggtgcaggtcgtctatgctgcgtaccggctcatcctcataaataatgctcccgagcctgcgccggatgcgctgcatctgcatcatttccaccgcttcaataaaatcagcttttccgctgcggctgcttcctacgaccgtcaggcccttttccagcatcaggcgtgtgttgatagcgaccttgttctccgtcacgccaaggaataccatcgtcccctgcggccggatatgctcaatcatgttgttgattgcgtcataacagccttcgcctccgacacattcaaacgcgtggtcaattttaaagtcgggaggaagcgaatagttgagataggtctggttgacgaatgaaaaacgtgaaagcttccggttgttttttccgacgaccacgattttcgatttcgggaatttcaccttgagggcgcttgcgataacgtacgacaagctgccgtctccccagattcctatggtgtccctgcagtcatgtgccgccgcgtccatccggttgattgcgtggaccgcgacgctcaaaaactcacagatagacgcggtcgaaagcgggatgttttcaaacgggataacccggtcgggcggcatgtccacgaattcacgcataaagccgtctgtgccgcttgacataaagtaagatttttcgtcgtagttttcataaataccgccgcaggcgcgcgttggcgtattcgggattaggactacgttttgccctacttcgtaggtgccggttttgtcgaggataacctcgccgcagcattcgtggattagcgccatcggcagcttttcgctcaaggcccgcatgtcgcggttgcccagataatagcgctggtcggcgtggcagatggacatatagcgcggccggataagcaccttgccgtctatgtttgcgtcctcatattttacagaaaagaactgtgggttcaccagctggtaaatataattaatcaccggcgatccccccgacaagcacctgcgctatcttgtagtcgttgaccgtcgttatcttcatgttggaaagctctcctgtaatgagctttacaggtacgccgcgcataacgcatatcttgcacgcgtcggtcagtaccgccttctcgctcggcttcagctgggaatacagctccttaagcagcttaatgctgaagctctgcggcgtctgtccctgatacatataatttctgttcgggatttcggatatgtccacgccgtcgtgggatttcacaatcgtatctgaagccggaacgaccgtatcgcaagcgccatactggattgcggcgtcgatattttcattgaggatgcgcagcgtgacaaaagggcgtaccgcgtcatgcgtgacgataatatcgtcttcatcggacccgaaatccttagcgatttcctcaataatattaaaaatcgtatcgttgcggttttccccgcccggcgcaagctttaccttgtcccggtctatctcgtacatttcgagcaggtcggtcatgtgggaaatccagcttggatgcacgccgatataaatggcgttgagccttgcgcacatcagcatcttttccagcgtatggatgataatgggcttgtccccaagcggcaaaaactgcttgggcatagaggaaatgtgcatccgcgtgccgctccctccggcaagtatcgctccgtatatcatgctagtcttacctccgaaattcaacttattttccgctgttttctttttgacgccgctctttgtggtactcgtagcagcttttgttcaaatcaagatacaccacatcgtggtgcggcacccgtttttcctcgggcggcagctccatatagtcaccgaacgcaatctttaaatatgtgtcatagcctgtgggaatcggcatttggtatccctcaaattcacggtaaacggcgctttcaaaaacttccttgggatattcgcactgcatataatgcgggcctgtgcacagctctgtaataaggctgcagtcttttatcctgtattttgacatcttcttttccgctaaacgccatatcttttcccggagctttttcccgcgaaacagccctaaaagaatacggctgccaagcgccaccaccccaccgtggttttccggcactacctgcgcaagaaacagggaataggtcaatgcccacagcttttgtattttacgcctgattcccgttgggcatccatcgattgggaacacatccatggaaagcccgtgcggtatatcaaggtgcgcctggttcgccttgacacacgtggcgctcgtatctacaatcgtcgtaaaaatattgccggtaaatattgtatcgtctgtgcgcaggcaaaggaagcgcgggttctttgatttttccttccaaagcgcatgcagcttttcatagtcgtcccgcggcataaaaacatcgatatcgtcgtcccacggcacaaatccgccggttcggagggagccgatacagcagccgccgcagaaataaaacagcagtccgttttcatcgcagaattctttaaaatataacagcgcgtccagctccttgagctgcatttgcctgagctgcccgtcgttaagcgttatgggcccattgtcattcaaccgtgtatcccctctttccggattgtttttctagaagcttccccgaaacggattcttttacgaaattgattctttcctgcgcgccggttcccagcccttttctccaaaatggcatctttatcaccccgaacagcgtaccgacgccgtaaacaatatgcagaagcggaaataaaaaaggcagcagtacaaactgcaaatatgcttttcttccggaaaacgccgacgctgtgacagccgcgtcgaataaaaggtacgcggcgcttaaaagaataagcggcaaagtaacaccgcatacggcaagcacgccgaaaataaggagcgcgccgacaagccccaacggcgcgaaatggaaataggaaagacagcgggggcatacgccgagtgtcagcccaatccacattccgttgccgtatttctgccggagcatttttgcaagggtcgcccgtacgttctggtacgatacgatgtcgggacagctgcttatccggtagccggccttacgaatccggtaatgcagctcgttgtcttccgtccttccgaggtcttcattgaagcctccggcctttgcaaaaacctccgccctgtaagcgccgtggaaaatggagcttacctcctgtttttccttctgctgcctgcggtatttcgcaatggagcttccaaaaagggattcctccagtgcaagcagcgtcatctgccacggcgtttccttttctgccctgtttggccgccctccgccgcagacagcttccccttccctgatattctttacatttgcgctgacaaaattctccgggatagaagcgtgcgcgtctacgcggataataatatctccgtttgcagccaatatagccgtattccaagcggcggcctgtaaatttttcgggctatcctgtattattacgcggcaaaaaccgttttgctcctttgcaaacgactccattacggcctttgtgccgtcagtggatatgtcgtccacaaaaacgacctcgatatccccatggggatagtcctgtaagcggatatcgtcaagcagcctgggaagggccttttcctcattataagcaatcacgcataatgaaaccagcattaaaagccctcctgcgcgggcgcgcgcatccatttggcactgaccgcgcaggacgccccaaaatacggaatgacatacagcgcgggaaccacaaaaaagcacagcaaaaaccagggcaggaaggaaagcaggagctttgcataacgtattgtgttgcgcttcatcatcagcacggaatgcttgatgcaggccctggcgggcagtttcccctgcccatcgataaatatgtataccgccagaaaatagcgggaggtaagaaatacccacaaaataacgcccgtgataataaaaattaccgcgaataccccgttcattactgtataattcgcagcggaatagcccggttcgttctgcgcggaaaacatgaaattagatagggcggccgccgccgggacagcacagactatcccccagaatagataccggagaaaaagctgaatacagagcgaaacagaccttttataagtttccgcatcggaaaaaccggagaaaagaacggaaaaatccgtatcctgctccttggcgagcgcatcgttccatttgatatatccaaccaatataggcgaaaacaccacaagaaccaccagcgcaagcagctcaatcagcataaggcttaaaagctctcctgaatgcgcctgcggattagccgacaacgcgtttaaatcgccgccgtttataaaataggcaacctgcaggactgtattcgacaccagccacgcgcatacaagaaaaacaaatgccgctaccgccttgcaccagttatcctgcgacagacgcgcctttgcctgcctcttgatgattccctccgctttcatgcctacacccctttacaataaaaaatataactaagcgtttaacagccggtacatcgcctccaggcagatttcagcgtgcttcaggtaatggtcgagggacatcgattcatccgcgttgtgcaggcggcagtcctccccttcaaatacgggaccgaacgcaacaccgcgcccagccatcgcccgcgcgtaggttcctccgcccgtcgggtaaacgcgtgcgtcctcccctgtcacttctttataagcgtcctttaaaatcgttaccagctcggaatccttgtcgatgttgagcggcttcatatggcttagcagcttaacggaaagcccctcggactttgccgccgcctccacgcgctccaacaccaggtctccgtccattgtgacggggtagcggatgtcgagcgtcgcctttgcggtattttccgttatcgtaaccatgccgacgttgagcgtaagcgctcccgacgcggaatcgcgcatcttaagccccatggaattgccgtttgtttctgtcgctatttttgaatcgataaaagcgggtatgctgccgagcacagaatgcccgaattgggacgtaagcaaatcaatcagatgggtcgcggcattaaagcccttttccggctcagaagcgtgcgcggcctttccttttgagataatcatcatcccgtcgattgtatatttaaattcaaacgccccgtccttagcgtccgcaaagcggtttaattgatggtcgtcgttttccgagcagtcaagcagcgcgtacgccatgtcaggcacagaattgaccgcctcgcccgccttgaattccgtcagggtcgtcccgtcatgtgtaggggcgacaacctctacctgcaaaattcccttttcgcagcggcatacgccgtattccgcgtccggcgtaaagcccatttctggcagcggctctacgctgaaatacgtcttcatgtcctccatgccgacctcctcggtcgtgccgaagataacgcgcagggtatttttcccctccacgcccatatccttaagcgcctttaggcagtagagcgcaacaacagcggcgcccttgtcgtcggcaacgcccctgccgtaaaggcggccgtccttctgtgtcagctcaaacggcttggaggtccagccggtcgcagcgggcaccacatccagatgcgtcaaaacggcgcagagcttcccgccgctgccgtactgcgcgtgtcccgcgaaatcgagcacgtttttcgtatcaagcccgaaggattcggcttttttgagcatccagccgagcgcctgcgcgggcagctcgtgtccgtccgccgacacggacggaatctcaataagctcctttaggtctttcaagatatcgtccttatattttaaaatgtgttctccaaatgacataacgcattacctcttttcaaataagggtttattctttgccggggttcccctgtttttcttcctgctctatttctacaagcagctcccttgcctgcggcgacagctcctcttcgggctgaagcgcctggccgcccgctaaagcggcgggaacctttttcgccttcatttttctcataatacggtaggtttgtttcttttttgtctcatccgggcgttttccgcggaaaaacagcatataaacggcaaacgcaaggaagcacgcgcccgttatagccattcctattttaagccccggcgtttcgtaattgaacctgatttcgcttatcttgccgcccggtacgcggattgccataaagccgacgtttaccttttcgatatcggccggctcgccgtttaccgccgcgctccagccgtcctcatacgggacgctgaaaaacaccagctggtcgcccttgccgctcaaatcaatctgcgcgctgaagcccttgctgtcatacacaaaatttgtacaggtggtttccctgcgcgcaaggcagtcctctttatactgctcctcgctataggtgaagcttccgccgtagctgcttccgccggtaatatcggcgtacttttcaagctgcccgtcggtaagggtcatcgccttgagcaagagcaggtggcggctgctttccgggcagctcttgtatttttccacattaataaacttgtcatacgtgaatcccatcgggatatagtattcgttttcccagatgtcgtatccgttctgcgtatcgtaataattccagccgggcattgccgtatcgttattttcgtccgtaaagctgtcgccgtcgaacttgtagtcgaacagccagcgggtcgaggtaaacgagcgcaagccgtagacgtccgtttccggacgggaaccgacgtcgcgcgttacaccgatggagggataaaaatccataacggagccgggcacgatgctatggaacgcctgaatagacggaatctgccagaacatcgccgtgttgtccattgttttataaaaatcacttctcgcgctgttcgtgtcaggcaggtcgatttcgccgcccttattgagcacgtgcggaattatgaactcatgtgaattgtagccctgcgtttttcccaaaatcagcaggtaggacgaatagcatacggaaataatgccgacgcacacatacgtataacggataaatttcctcctgtttttacgcatcagcttgagaagcagcgccagcaccgcaaggcttacaagcgctaccgcgccgtaggcccagaaacggtcgggatactgcatcagcccgtaggttgttaccgtttccccggtctgcgcttccgtcgtattcggcataaggccgatggccacaagaatgaccgccgtaatcgaacccgtccaggtaagcgccctgcgccagtccgttttgctgttctccagcgatattacggtcgcaagcgacatcataagcgtaagcatatagaaccatctggcataataagaagaattaagaagctggaacaggctgttgaggattgggataaacgccataataaacagcgtaacgattagccttttcagccagtttgtgtgcttttttgcctgcatgaacgcgataacgcccgtcatggaaaacaacggcagccatgcggctacagaaccccactttgcgttggaatccggcgtaaagtttggccgcgcgggaatatccggcgggaaaaagaagctttccaaaatatggatatagcgctgttcggagccgtaaagcaaagcgccccagccgttcggcgcgctgtcgacgcgcggattttgcagcacggcgagcaccgaaggcacgagtatcaccgccgacgcgccaaagccgatgagcacctcagccgccatacgcaggaaatcgcgcagcgtaatacggaagctgccggaaaccatccgcacaatccaatatatcagcacaaagacgacctggccggcaaagaaataatagttgaacgcacagctggcaaaaacggcaatagcaagcacgccgcgccgcctgttatacatatattcgtcgaccgccgccaaaaggagcgggaatacgacgattgcttcgtgaaaatggttgaaaaatatgttatagatagaaaatccggaaaaagcgtatagaagcccgccgatgaccgccaaatccctgctgcgcacgtaacgtttcagaaaaacataaccggaaagcgacgcgcatgcaaatttaagcatgagaaggggcgccatcaggtaaggaaccgcctcgcttggaaacggcagcgtcagccagaaaaacgggctgcccagcaggtaaaaggaataagaaccgacaatgttcgcgcccaaatcggtcgtatggctccatcctaaattacctgaacgaatgctgtcgtgaatcatctggtaaaagggaatctgctggacgttaaagtcgccgtaatataaaaacaatccctggtcgtaaatcaaaaaggggaggaaaaataaaaaagaaagacaaaggcctaataaaaacgctttatgccaatatcttttctttcctgctggagagggcagccgtgccgctttcatatgtccaccgccttatatattttaacgaaaacaagccggaaatgtctggaatgaaccccttccatccgcctgtatttataaaaataaagccgacttgtacacaatataactatggtattataccacaatccgacggcgattgcacctgttattccgacaaagtaataaattaatagttttgtcacaaactcttaaaaaattgttgtagaatagttacagcaaaagaaaaatgaggtgttattttggcagaaagcagcttctttgcgatgctctccagaatgaaatatatcgaccgttgggggcttatgaacagcaccaggaaggaaaatatcagtgaacacagccttgaggtcgctgtaattgcgcacgcgctggcgctcatcggtaaaaagcgcctggggaaaaataccgagcccgagcgcacggcggcgcttgcgctgtttcatgactgtacggaaatcataacgggcgatatgcccacgccggtgaagtactttaatccgcagattaaggacgcttacagggaggttgaggccgtagcggcagaaaagctgctggggatgctcccggattatctgcgcgccgaatatgagcctttctttacaaagcaggcgcaggatgaaacgctttggagctatgtaaaggctgcggacaagctttccgcgctgattaaatgcatggaagaaattcgtatgggcaacctggaatttacaaaggcaaagcagtccgtttcagaatccctcgctcagattgatatgcccgagctccaaatttttatggaggaaatgctgccggcttataatctcacgcttgacgaactggaccagaggctatagctgttgacaatttcaaccagcatgctataataaaaatgcggaaagcacacaaacggttttccgcatacaatatcataaatgctgtcttcgaggcggggtgcaattccccaccggcggtaagcgtgtcaagcgcaaagcccgcaagcgaaagctgatttggtgtaattccaaagccgacggtaaagtccggatgaaagaagatgcgcgcttattatattaagcgttattgcctcgcagattacctgcggggctttttttgtttcaaaggcggcagaaaaggagatgctttcatgcaagaaaatcaagcacacaccatcaaaaaagccggcgaacaatcgtatcggctcaaaaagctcgcgatactggggcttttgacggcgctttctttcctgtgcgtcgcttttttccggattccggccttcctgccgttcctcgatttggaagtaaagaacgtcgtcatcacaatcgccgcgtttatcttcggccccctgtccggcgccgcaatcagcgtctgcgtggcactggtcgagatgttcaccatcagcaccacgggatggcttggctttattatgaacgcgattgccagcctatgctttgtctgccccgccgcctttttttacaaaaaaaagcacaccatgtcgggcgccgtgctggggcttgttactggctccctgcttatgaccggcgcgatgcttttgtggaattacctgattacgcctttttatatgaacgtttcgcgcgaggccatcgcggcgctgcttttgcctgcgtttctaccgttcaacctcgtaaaaaccggccttaacacagccttgattttactgctttacaagcctgtagtcctgggattgcgcaaagcaaaccttattccccaaaacccatcaggcgacaaaccgagaagcaaggtcagcatcggtattttgattgccgcaggcttactgcttgcaacctgcgtattggtagtcctcgtcgtaaacggaacgctataattatgctggtattaaaacgctccctgccattagcagggggctttttttgtcctaaatagctgaaaaatattccgccggcatttgaaatgaaaagaactcttgtcgaaattaaaaattttatatacaatattgtgaaatgttttcacatatggtaatatataataaaaattaaaggagcgtgtattatgaaaaaagcaattatatttttcctttgttccatttttttgttttcttttgccagctgcagcccgagcgatgaagataccagcctgaacaacagttcctccccaactacagttactacgccgtataccgacccagcaactgaagaaccgaccgttgctccaacgaagaagcctacggaaaagccaactgaagaaccaacagaaaagccgacagaaaaacctacgcaggcgcctgtatcttccaaaagtgcttacagcataagcaaatcgtcctccagcgccgaacaacaaaagaactcaatgactgtttatattacgccgtccggaaaaaggtatcattacttgagcacctgcggtggaaaaaattcttatgcggtatcaattgatgaggtcggaggccgtacgccctgccaaaagtgtgtgcactgatatccaggtaaagtctcgcttttcacgcggggcgtggattgggtcgcagagcaaaaaaacttcacaagtccagctttgatttttatcaaatatttactgcggtatctgattcaaaatatacagagataacgataggaaatggctctgccagttagggttgagtgagacaaaaaaacttctaatcccgcctaacgaggacaagtcaatagaaaaatttcaccttcagactatttatgagcttgagaatgataaggaacacctgataaacattttgcaacggtatttataataatctttgagtgtcctttcataaagaaaggacacttttatgtatcatttgttaaagaaggaaataaaaatgggacgtataaaaagccggtcatttgaaattattcaagcagccaaaccaggggataaatccagtaaaatttttgatatttttataatatcgcttattattatcaacgtagcaatggttatcgcggagacatttaatatccctgctttcttacgcgatgtctttaatattgttgaaataatttctgtcattattttttcgattgaatatattcttcgtgtttggacctctgatttcctatatccaaaattggggccagtgaaagctcgtctcagatatatattttcatttatggcaattattgatttacttgcagttcttccgttttatcttccttttcttatcccaatcgatttacgtgtactacgtactttaagggtaatacgcctccttcgtatttttaaagtaaaccgctatacgaaagccctttccacaatagctgccgtattcaaacgcagggcaagtcagcttttatcatctatgtttgtggttactctgctcatgattatcgcatctgttttaatgtatagcattgaaaacgctgctcagccagaagtgtttgataacgctttttctgctttatggtgggcaattgcaacaattacaactgttggatatggcgatatctatcctgtaaccgttgcagggaaaattttgagtactataattgcattacttggaattgcgttggtagctgttcctaccggaataatttctgccggttttattgagcagataacggattccccaaaaagtgaacaagaagataacgtaaagccctactgtccttattgtggacataaattggaaaagtaaagaagagccgcaacatgaaaaccaacgccgttacctgcgcaaattccgcgccgttcatggcactggaggaacaccgggcaaggcaagcgcaaataaaggcactgctggaattcgcatcaacgtacggctcggcccgcacgttgtaccgcaggatatttacgagcggccgtttcaggcagcagcctgtttgcgcgcccgcagatgctccgtctgcccggataggtgcagctagggcaatatagcgccgtgtatttttaaaaatatccaaagaaaaaaagccgcaggcgctgcctgcggcttttttaagcctttggtattcagtttttcggcctgcagcagccgcattcatccccgtttaagtcagaaaccttcggcgggaagaactcgtctgtcgggaagtcgagcctgctgaacatttcacacgggttgtctgaagacgttgtgcattctttttccggaatacagaaatcatacgcgggaacgagcatttggacgttccgctcgatctggacaatcgtaaagatgccgattgtaatataaacgtctttttcgccgccgttgcccgggacagggccgccgtatcggcaggagatacagtcgggaatcctgcagcacggtacgcagggttccctgcgctggcagattttagcggaaaggcctattggttttgcgacctggacgcttgccttcggcaggttcctgaccggggcgttctgcacatccggatcgtccatcgtgaagtcagagctgaatatcttgacgttgccctcgctgccgtaaaggataaccttcttgttaaagatactgagccccttcacacacattggcatagctgccggctgcatgaatacgtcgagctctacatcaaagaagaacgtcatatccacagagtaaaagcccttatggaacggaaccggctccaagtcgatatatacggtgataacatccacgtctctgattctaacgttgctcgccttgtctatcatgcactgtgccgtatcgcaaaacagtacctttaagtcctctaggcaatctttgtctccgcagctgtcataaaccctgtaagcatctatacaaactgcttcttttgcgcatcctgtgtcgtcgccgccgcacgtagcagcggtaaatgctgtttcagccataaaaaaatcctcccttattagctttactaatattgtatggaggattgcttttattgtgacaaatttaaatgtctggcaacagtgcggtaccggacctttataagctgtgctctttcaattatatgccgtatgcagaattctcccaattgttttcctattttttcctatatttaatatattaaattttccccgtacaatctaaactgattttttagctcccacgtttttccatgagccagaaaatggaaagcacaggccgcccagacgcagaatacatttccattgcccttgtacgcagcatgtgtaattataacagcatattttatttggtttttgccctactgtatatttttaattgtaaaaaggcccgctgctcaaaatgatgagaaacgggccttactttttatattttttcgagctttgcaaagttttgcataatccgttttgtcccaacgctttcaaacgcaatctcaagcatcgtgtcgttgcccattgggacggcgtttatgatgagcccctggccaaacgccttgtgccggacgctgtcgcccgccttgagcttctgcgcggcagcctgtccggcggacgctgcgctccttgcgctcgtgtgagaggcaaagcctgaggtgcggctctggtaggcggtgggtaccgagccctgctgcggctgctttcttacaaaggaggagcttatttcgagcagctctgccggaatttcattggtaaaacgggatacgcggttcctctgcgtcataccgaacatcatgcgctcggaggcatgcagcaggtacagcttttcctttgccctggttattccaacataggcaagcctgcgctcctcctgcagttcctcctccatcagcatcgactggtttccggggaaaataccgtcctccatacccgggataaacacaacggggaattccagccccttcgccgaatgcagcgtcatcagtacgacgctgtcggcctgcgtatcataattgtcaatatcggtaaacagggcgatttcctccaaaaagcccgaaaggctcgcttcttcgccgttgtcctcttcatattttaaaatattggagagcagctcgtctatgttttcgatgcggttgtcgctgtcctctttttcctttttcagccagttgatataatcggtgcgttcaagaacagcgctgtaaatttcctcaatcgatacgtcttcccgctgcgaaagagcaatcaggccgtccatcatcgtgcagaaatcgttgagcttattcgccgcgcgctggagcggggcgttttcatcgctgcggctaatcacctcgtacaggctgtcgccattgacagcggcgatgtccgccgccttatttaccgtagtatccccaatccctcgctttggcttgttgataatcctcctcagccggatatcgtcggaggggttgttgatgaactgaagatacgcaaggatatccttgatttcctcgcggtcataaaaacggtgcccgccgattaagcggtacggtacgccgctgcggctgaagctctgttcaattgagttcgactgcgcgttcatgcggtacagaacggcaaaatcggaatatttccttccttttgacacctcgtcgagaatcgtatccgcgataaaggaggcttcgtcgcgctccgacatacagctgcgcagaacgattttatccccctgcgggttctgcgtccagagcgttttgcctttgcgctctttgttattcttaatcacgccgttcgcggcgtcaagaatgttctgcgtagagcggtagttctgctcaagccttatgacacaggcgttttcgtatgttgtttcaaagctcaatatgttttcaatcgtcgcgccgcggaacttgtaaatgctctggtcgtcgtccccgaccacacagatatttccgtttttctctgccagcatcttaacaaagcggtattgaacccggttggtgtcctggtattcatctaccataatgtaccgaaactgcctttggtaaagctccaaaacgtcgggtgcctgttcaaacagctttaccgtgttgcaaaggatatcgtcaaaatccatcgcgtcggaggctttgagcctctcctgataaagcgcgtacgccttggcgatggaaacgagccggttgtcgctgcccgccgaagcctttagctcgtcaggcgaaaccatcctgtccttgcagcgggatatctccgcgagcacgctgcggtgcggcaggattttttcgtcataattgagcgttttcaggcagtccttcatcaggcggcgctggtcgtccgtatcatagacagtaaaattccgcgtatagccgatgcggtcgccgaaccggcgaagcatcctggagcatgccgaatggaacgtggccgcccagatgtctcccccgccttccccaatgcgggcgttcaggcggtccttaagctcacccgccgccttgttcgtaaaggttatggcaagaatctgccatggagcgggcggataaaccgcaaggcgcgcggcaagctcatcgtcaagcggcccgttcccctgtgccgccgcgttcaggcgttcaagctcctcctgcgtaaaatcctgtggaatcaggtcgctctcatacgccttgccgtactttaatatacttgcgatacggttgacgagcaccgtcgttttgccactgccggcgcccgcgagaatcaataggggcccttccgttttgaacacggcttttttctgcatatcgttcattctggagaactcgttctccatgactttttttcttaattccaaaagttcttcctttgtattattcaaatgcgaaacaaatcctttctaaaaagcttgtgtttcattttatcttattttgcctgtttctaaaaccttctgtggaattaaacagaaaaaaggccgccggttcgcctccgacggcctgcaaaaaaatttctattccgctatttctcagccttcacggtacagcccgcgcagcagcttgatttcctgtgcgtagccgtccaaatcgttcggcgtttccaaataaaacggcaggcctttcagctttggatggttgatgacgcttgaaagtgcctccaggccgatatgcccgttaccaatcgtttcgtgcctgtccttatggctgccgaacgggtttttgctgtcgttgagatgcacggtataaagccgttcaagcccgattatacggtcgaactcatccagcacgccgtcgagattgttcaccacatcgtagcccgcgtcgttgacgtggcacgtgtcgaagcacacgccgagcttatcctttaattccacgccgtcgatgattgcgcgcagctcctcaaaggtccgcccgacctcgcttccctttccggccatggtttccagcagcacggtagtcgtctgctccggctttaaaatgcggttgagcagctcaataatcattttgattcccacctcagcgccctgcttgacatggctgcccggatgaaaattatagtagttgccgggaacgtattccatgcgcttaaggtcgtcctccataatcatgcccgcaagctcgcgcgtgtgcgcgtccgcagagcaggcgttcaaggtgtagggcgcatgcgccagaatcttcgcaaagcccttatcgcttatatattcatggtactgcttaatatcctccgggttgatatccttagcggcaaacccgcgcgggtttctcgtaaagaactgaaatgtatttgctccgatagaaacggcctcctgcgccatatgcaggaatcccttggaggcagacaaatgtgctccgatattcagcatggttttccccttcctttcatacaatggtattattgtggtgtttcccacttttttatgcagccgctctgcaggcacagtaagcccgcggcggattttccccagccgccggaacagctctcgaaaccctggcatgtgtttcaatgttctcccagccgccggaaggcttgcttttgcaaggcttccgccctgcggcgtgaggttattataacacatcagcaagcccgcagggcttgcttccttcaagagggacggcattgctgtcccggcatgtgtttcaatgttctcccagccgccgggaggcttgcttttgcaaggcttccgccctgcggcgtgaggttattataacaggataaacgaccgcgcagcgggcagctcctctgcaaggaaagcgtccctaagctttccgtacctgtttcaatgttctccaagccgccggaaggcttgcttttgcaaggcttccgccttgcggcgtgaggttattataacacatcaacaagcccgcagggcttgcttccttcaaaagggacggcattgctgtcccggcatgtgtttcaatgttctcccagccgccggaaggcttgcttttgcaaggcttccgctttgcggcgtgaggttattataacacacatcccgccaaacgccaagaaagggattgtttgctttcctcttagtttcgttgtataatgtggaaagcgtttttcgggggaattccctttgaatatataagaaaggggctatcaattatgatttatgacaatattctcgacgccatcggacacacgcctatcatccgcttaaaccggatggcaggtgaaaacgatgcgcaggtacttgtaaaatatgaaggcttgaacgtcggaggttccattaaaacacgaaccgcttataatatgattctggaaggcgaaaaaagcggcaaaatcaagcccgacaccatcatcgtcgagccgaccagcggcaaccagggtatcggccttgcccttgtgggcgcggtgcgcggctatcagactatgattgtcatgcccgattccgtcagctacgagcgcaggaagctcgtcgagcattacggggcgcaggtcatcctcattcacgacgacggcaatatcggcaaatgcattgaggaatgcctgaatacggcgctcgatatggcgcgcagggacgaccgcgtatatgtgccgcagcagtttacgaatccggcaaacccgcttgtccacaagcaccacacggcgcttgagattatggaacaggtcgcccagccgattgacggcttctgctccggtatcgggaccggcgggaccatatccggaatcggagaggtattaaaggcgcagtatcccgatatccttatctgggcggtcgagccggaaaatgcggcaatccttgcgggaggcaccatcggcacccatttacagatgggaatcggcgacgggctgatacccgacaacctcaaccagaaaatctacgacgatatttatatcgtaagcgacgaggaagccatccaaaccgcaaaagacctggcaaggctcgaggggctgatgtgcggtatttcctccggcacaaacgtcgctgcggcactcaagatggcaaggaagctcggcaggggcaagacggtgataaccgtattgccggatacggcggagcggtatttcagcaccccgctgtttaattaaatgaaaagttttttgagccccccggtacaccggggggcttttataaaaagaaagccgccgcgttctctgctgaaaacgcggcggacctcaaacaaattcacgtttatacgacttcaataacagaaacgggacagctttcctgcgcctcaaccgcgcggttttgcacctcaggcggaaggtcctccgccgcggcgtacgccttgccgtcgggacggggcttaaacacctcgggacaaatctccatgcactgcccgcaggcaatacagccgtcttcatcgaccagaatcgtcacagcattcccccctctcctgtagtaagggaatcgacaagctgctgcatttccttttttgactgcacgctgtgcgtcctgccgatgatttcctgctgctgctgttccgaaagggaggcaaaacgctccattgcgtctgtgtttctggcaagcgccatgccgaagcccatcgggagttcgcttaaaatatcctgcataaatatcaccctgtatgattgtttgcaggatatggaaaatttatacgtcctccagggaaatcaaagaaacattttcactgtaaattttgtcattgaaaagcgtgtggtaaatccggtcgagcgaccggtgaatctgggcgtccggatattctccgcccttcctcttcaaaaacataatgttgtagcaatgccggaacagcgagcagtaaagcgaggtcgtaatgaacccgttgcgctcataaaaggcgaccctgcgcagacgctgctttttatcgttttcgtcccgtgccttttcagggtcctccacctcggcgattatcccattaaaatcggtcagcaccccggtcaaaagctccaaaaatttacttccgtagcccattgagcgctgagacgcgcagactgcgtaataatcaagcaggacaaagccttcctctttcctgccgataaaaaacgcgtatccccgcagctccccttcatcaaaaaggccgtagcaaaaataaagcttttcttttttcagctccaatatcagcgtcagcggctttagctcaccgacctcaaaatcctttaccatatatgtccggtatacctcggcaatctcgtcatcctgcaagagtctggttgtcagcatcttctcaccctgttctttcgtaggtttcgataaaatttacttgtagtattaacaaaataaaattcctttatttgctaacagctctttaagctccgtatatttgttcctgctcaaagggattttttcgctcacgcccttgagctcgataaagtaggattttccgaacacattgttttgcacagatattatattcgagagcggaataataaatgactggtggcagcggaaaaagccgtgttccgtcagcatcgattccagctgcccgagtgagtatttggatagcagcgtttcgtcctgggcggtctccagaaaaatctttcttccttttttctcaatatatttaatgctgtctatactgataatttgatacccgccttcaaaatggataccaattttcgtctgtttgaccgggctgtcgccgcccgtcctgcccgcaagctttttctcaatcctgccgacggcgcgttcaaggcgcagcaggttgataggcttaacaagaaaatcgaccggctcgaagtcgtagcagtcaagggcaaaccccgcatggcccgtcacaaatataattaaaacagagggataattttttccaatgtactgcgccatttcaaatccgctgttttccggcatttcaatgtcaagaaacgcaacgtcgattttcttttctttcagcgccgcaatcatcccggcgctgctgttgacagcggcggcaatttcaatttggctgaaattcgaaagcgcggaaaccgtcgcgtccatcgcggctttttcgtcgtctacaatcagcgcccttattatttggccggccaaaactcttcctcccgtcccagttttcttatgaaattcatcataacataaagcttctatattggcaacaaaattcataaaaggcactaaatttctgttgcatttcacattattccaattttcaggttgtattctttgcataataaatggaaacagttcagcaggatattgtattcaatcctttcctgtgttaaaattgatacgaaaaacgcaaaggaggcgacgcgtatgaattctgtatttactccgtttgttatttcagagttatgcctttacggtctgtccgttacaatgattatggtcataaccctatttattaatacgaagccgcgtatctgggatatttttctatgccttctgttcggcgcgttccataccggcgccatcgtcctgttgaaaggcgaatatgagctggcggccgctgcggtaaccgtccttctttgggccggcatgagaatgctttccaccaagcgccatgttatggagattatcctgagcggttctattacattttcggccctgatgcatttctatattttcggcgcgcttgttgggagcctgacggacgatttgtttatcatgatttgcctggcgctgtatgcctgcctgctctgcgcgctgttcatcattttttaccggtgcaacattaccatctttaaaagcaattggattaaggacttttttgagcctgacgacaaggcggtcaaaagaaaccgttattccgtcttcgcgctgttcattattatcaacctcttgaccatgattgccatttactcgggcaccgggaaaaacgacgtcgttcaaaacgcggtacttacgctgatttcggccgtattaatcgtactgttcttcctgcttatcaaggtgcttgtcgaatattgcatcctgcacgacatcaacgcgcgcaacctgcgctaccagcagaacctggagcagtttatgaaggtcatccgctcccagcgccatgatttcaacgtccatctgcatgcaatcagcggtttggttgaggcaggaaatttcgaccagtgtaaggaatatgtcgcgactatggtacgggaatcaaacgcaattaacgacgtgcttcctgtgcacagcccgattatcagcgccatgctgcacggctttcgtgaagaggcggagagcgcgggcatcagtatggatattgaagtcctttacgatatgaaggaattagccgtaacgccctacgacctcaacaggattttagggaacctcattcaaaacgcaatcgatgaaatcaagcgcaacaaggacaaccagtatggtatccagctgaaaatcagcagggccgacaatatgaccgtaatcgatatttcaaaccgctttgacccgcttgtgcaaaatgtaaaccacatgttcaacgacaaatatacgaccaagcggcggcacgacggcatcggtttaaacaccatcctgcgcattacggaatcctacggcggaatgatttatcccgaaatccacgacgatatcatccactttatcctgcgcctgccaaacgaacagcaataatcacatccccggagtaaaccgccggggattttttcttttcccaaattgacacgtgtatttccagaattgacacgatacaggacacaataggcaaaacgccttgcttttcgtttccgttttccataagatatagttgtcgataaggacaaacaaaaaatgcctatcactttttcatatataccttccaacgaaccggcagatatttccccatatctgccccttcgctagaaggtatcggatggactcaggtatagtaaaacatacaattacctctttttctacagcctttccggcaagcttcttgctggaaaggcacagctcgaacatatgcgggatttccgctttctataatttgggatttcttgagataatggtacggtttttttgaaccagtggtaaaacaataaggattacttgaaggaagtaagatttaggattttgaaatgaatggtgttttctccggtacaagccaatgatgaacggtaatctctcctgatttctcggtcgtcttccggaagaaaagaaagaggcgtgcgaactgataattcgcacgcctctttctttttgtttttatcccttatattccaacgcagaaggcgcacggtaatcccgcgcgccttctgcgttttgtatgttggaagtgtgttgtaagcagtttattttttgaccatagacttacagccaaagtaggttgcgagcatatagccgccgtacaccagaacgatagcggccgcagcggcgatgattccgccgagcgcatcgacctttccgaatacctggataatctggttggctaccgtgatgccaacgatggaatggataattgcaagcagcagcggcagcataaaggtgataaacacctgcatgaataccgagcggttaatcatcttcgggtcggtgccgattttgcgcagcaggcggtaacgctcctggttgtcggagctttcgcttaactgctggagcgcgaggattgcggcgcttgttatcaggaagatgatgccgatatagatagcaatataagtcgccacaacgctcatacccttgctctgctcatacatttccgtttttgtagcgcaagagctcgtcgtgaaataattcgatttatccggctcaatcctgtcgcagcgttcggaaaaaatccggctgttttcttcgacattccctttcagctggacgttcacatattccctgcttggcgtaaggatatccttgaccgtttcgtcgggaacaattacgctgccggcaatcgacgcggcggctgtcgtataataggcgtcctcaatcaacgtgggataaagcgtgtattcctcgccgaaaatcgtaatcgtaccgccgtttttgagcagctcctcatatgcgggcatgttttcagcgtaattacagacgattgccgcctggcttccggagagcgtaatcggctcctttccctggagctcaagcgctttgttgaactgggatacaggaataacctccgggtgatattccatctgcctttcatatatttcgtttgaaacctgcccgttcagctctttgccgtagtccttaaaaagctgtttatactgcaagtctgtctcataaatctcaagcgaagcgtaatttttaacgatatcatcgtcaagcgcacccgcttcctcaagcatttttacaaaatagccgcgcaggtctccgccctcttccacgctttcgttatcgtagaaattatacaccgtcacatcgtacggcgtaacctccttgagcgtggccgccgacgtatcggcaatacccttgccggaggacagcacacaaattgttacaaacagcatcaggcagatgagcgtcattgagataaatgtcgtcgtcaccttggaattaatctgccgcaggatgaacatgttgagccctttataatatagtgacttgcagcccttgaccgcgcgcagcaaaaagccggacagggaaaggaagaacaaaaaagtcccgataattccgaggatgatgcacatcagcaccgtgttgtcccagacaaacagcccaacatcgataataacggtataggctgtcgcaaggcaggcgacggaaagaataaagagcacgaccgaaacccaaaggcttttgaccctgagcctttcgttctttttggacgcggtgagcaggtcgatgagcttgaatttcgataccgttataccattgaacagcataacgacaaggaagatgatgccgaaataaatcagcgtcttgataagcgcggcgttcgagaatacaaaatggaactcatcgagccgcacctcaaacatctgcgctgtcagcacggaaaggccctgcgccgcgaacacgccggcaaccagcccgaccgcaagtgaaaaaataccgatgacgagcgtctcaatcgtcaggattctggatatcgtaaatttccgcatgccaagcgtcatataaacgcccagctcttttttacggcgcttcatcaaaaagcggttggcgtatataattaggaacccgagaatgacggagataaaaaccgaaataccccccagcatattgataagcatctccatgatgtccctgctgtcggaggtcagccgctgcatgaccgcctggctgtcgagcgaattgaaagcgtaaaacaggcatacgccgaaggtcaatgtcaggaaatatatggtataatcccgaatactcttttttacgttctggaaagcaagcttataaaacattgtcgttgtcacctccgagaagcgtcacaacttcaatgattttactgaaaaattcctttcttgtgtcgttgccgcggataatttcgttaaagagcttgccgtccttaataaacaggatgcgcttgcagtggctggcggtaaacgcgtcgtgcgtaaccatcaggatggtggcgtttagctgtttattaagcgtatcgaagctgtcaagcagcatccttgccgacttggaatcgagcgcgccggtcggctcgtccgcgagcacaagcgacgggtttgtgataatcgcccttgcgcttgcgaccctttgcttctgccctccggacagctggtacggatatttgcttaaaatatcctcaatggaaagcgcacgcgccacacggcgcacgcgcgggtcgacgtcccttgccggtgttttggtgatggtaagggccagcgctatgttctcataagcggtcaaggtgtcgagcaggttgaaatcctgaaaaataaagcccagctcgtcacggcggaactttgacaggcttttggaattcaaatgcgtaatatccttgccgttgatataaatttttcccgacgtaaccgtatcgattgtggagatgcagtttaaaagcgtagtcttgccgctgccggacgcgcccataattcctacatattcgccctggtcgacaaaaaagctgatgtcgtccaccgcttttgtgacgttgccctttgtcccgtagtacttctcaaggtgctccacccgtaaaatgtcgtccatgtaaatctcctcctgtttttcatataccttctgtgtccctttcggactacgatactgattataacagcggaagagatttaaatccatcgctttgccttacaaagaccttacgtttttgtaaggtccgcaaggtctgttttcggaaagacaagctctaaagtcgttcccctgccttcctccgatacaatcccaacggaaagcccaagcttatcgcttaactttttgacaaggtacaagccaatcccggtcgctttcttgtattcccgcccggtaatgcccgtataccccttttcaaagacgcgcccgatatctttccttgaaatgccaatcccgttgtctcggataaaaagagaaacggcgttttggcgttcctgcgcgtaaatagaaattaccgcatccttctgcctgcggtatttgatgctgttgaccacgatttggtttaagatgtattccagccatttttcgtcggtaaacacagtaatagcctgtttttcaagctccagcttgattttatcccggataaagtgcctcgcgttgcgccggatgacctggtttaccacattgaacaggtttgtttcttttataatatagtctttctgcacatccgtgctgcgcgaataaaacagcgcctgctccagatagtagtcgatggcgccaagctcctcccccagcccgtcagcggcgggcgacgggttattttcgagaatcaggcgcgacgaggcgatgggtgtttttacttcgtgaatccacagctcgatgtattccctgtactcctttgacgcggtcttatactttgctatctcatcattcattgctttgctcagctgttcgatacagtcgctgaaaatacgcccttcatagaattcaggctcgtcaaggaacgaggcaagcaggtatttcttttcaagcgactggagcgtttcttccacctggctgtaatatttgcgccggggcaggtattcgattatgagcgccgcagcaaatgccagcgtaatcaccgagcaggcaaatatgattccctgcgtgttcatgctgtaaacccacagcagcagcgccataaaacagtcaacaaagagaaaaatcgcaattgaagcagccttgctctttataaaatcgctgagtctcataaactgtacccctgccctctttttgttttaatataatcagaagcgccgattgcttccagctttttgcgcagccggttgatattgacggtcagcgtgttgtcgtcgataaattcattcgactgccagagcgcctccataatatcgtcgcgctgcgtgatactcgtctggttgcgcatcagcaaatccaggatgcgcagctcgttttttgtaagcgccgcctccttaccctgataagaggccgttcccttcgacatattgaccagaagccccgcgtattcgtgcgacatttcgctttgcgcctgataggtgcggttcagaatagccgcaatatgcgcaagcagaatctgcgtgttatacggcttggtaataaaatcgtcagctccgaaattcatgctcatcagctcgtcgacgtcgctgtcgcggctggtcacaacaataatcggcacagccgattccttcctgatttcccggcagactagaaaaccgtcgtataccggcaggttgatatcgagaaggaccaggtgcggatgaaacgcaagcgcctgctccgccgcgttttcaaaccgctccaggcaaataatttcataaccgtacttttccagaaatactttaagctcgtcccgtatttttttattatcttctatgattaaaattttcattttttctcctcccatattcggcaatcccatcagaaggctgctatgtttatcttaacacaggaaaagcttgcctcacaatgtttatttgccttatattatctaatttctactattaaatccatgttttatttaaatttttaaaactaataattgaaagcattgatgaaacatggtataattttgtcagtttttagcgaatgaatatacagcgaaacccgcgtaaaggatgaactaaaatggtgaaagattttctctccagaatcgaagacggcttgtggaaccgggacgattcgtatatctgctattttcgtcaggcagcaaacggcagtatcattcttgaaaaatgcaacccgacctacctatattataatagcctgcaccgggaagacgtaggaaaatgcctggaagtcctgttttctgaagaatatgtctatcacgtaagaaagacatatgaaattgcgcagcatatcaccgattgcctgagcctggttcgggaggccgggggcgcatactgggaaaccaatatctattttgacgggtgcagattgaaggtttcgggcaaaaggctgaacaatatcctgtctgagaaaatctccgaccgttatctccactattttaatttcaactgtttacaggcgcatgacaaccatagcttaatcctgcgccgccaaccagacgggcgttattgtgtcgaaagctgcagtgaccagcttgaccggctgtttgggataccgctgagcggctgccctgatttcgggcaggttcttaggaagaactttttatggtttcgctctgcttccattttggacgattgcctgcgggtcaataagccgcttcgcgttttggagcttttccacaggaatggggagcataaatatattttcgcaacgctttcccctatgataggcggcggggaaagccggattattatttcaggctgcaggctcgatgacgaagagtatttccgtatgcagcagcagcccgtcgatatgttcaaagagctttatgaaagcaggtttatgggtatctgcctgtttgttatgcaggctgtatccgagcatgccaggccattcctgctcaaatcgaacccctttttcgatacccttttaaaagataaggggctcgaattgtgcgacatcgcggaaagcgctgtcatgcgcagctgcataaaaaaccaaaatatatccgccggaagcgttaccttaccgttatctgaaggcggccgttttttcatgtgtgccattccaacggagaacaagaaccggtatttgatagcccttagcccaaaggagagtatctcaggtaatacaaatattcttttttcggccttaacccagcgggaacatgaggttgtcaattatgtcgtagatggaaaaacaaataagcaaattgcgtgtgtcctggatatctctgagggaacagcgaaaaaaattatttacaatgcgtatcaaaaattaaacatcacttcccgtatagatttaataaaattggtgttgaattcataaaaacatatataaaaatgatatataccccctggcaaattttcctgtgatttattgcatatttgcataaaagtcttgtggaaatatgtggaaatcaactttagtggtattgagaaaataaaaacgctcctataaaataaatttgtaaaaaaattgtgaactaaatcttcatggatagaggtgaaagaattgagaatgtttacgtcctgcctggatggaagcccttactgctaccagattacagaggctgaaatagaactcgaaggcaaggccgtaaccgtatatggcatacacatatacaaagacggctgtaaacattcgcactgcttattagaatcctgcctgattgaagatgtatcggatgaactggaatatgtggaacgtcttgcgcgccatctagcggaaaacggagccgcgccgcttcatgcagagcagcttataagtgaatttttgtgtgaatatccatccagcgtatccgacctcgtataaaatgaaattttttatgcgcgagccgccatttggcggctttttcttttgcattttaaaaagtgtgaatccagaattaaaattacaatcttgttacaaactgtcgcaaatatgcatatatgctaattttttacaactctatgtcaaaagcgcagtatcttgcgaaagcgctatcgcttctgcaaaccgcacaacacatatataaaaattcccatgtttttgtgagtattgcttttattttccaattcctcttgaattcacaccgtgtatatgttagactgtaaccaaattgttacatattgtaacctgtttcttttccgaatttcccggcagatggttcatccgccagaatttatattcgttgctaaaacggaactgtaaatttttaggaggtctgaaagcaatgcacaagaaatgcaaggccgtgctttccctggtactgtccattatgatgctctctaccatcgtccttatgggcaccacggaagcgttcgcggcaacaagcaccggcgtcggcctttcggcgcacgcactgaaagcttacaatgaaaactggtcatatgtatggggcggaacttcccccggcgcggtcgactgctccggcctgatttattcctacaacggcgtcggcggtattcgtaccgatatgcttgcggcatcgcccgaatggggctacgtttcaagcggcatcccgagaatccacggcctgggcctgcatcatccggggcatgtcggcgtatatgtcggcagcggcatggcgatagatgccagaagctcctatgacgacatggtatacgaaagcgtctataatatgaactgggtcgaatggttcaaggtttcaggcgtcagctacccgaccaacggctgggtccgtttcaacggcggctctttctactacgaaaacgggcagtatgtgattaataccagcaggacattcgaaggggttacctattattttggctcggacggcaagtccgacaagactcccgcggataagtactttaagcagacagactattccaatagcagtgttgggccggcgcagaagccttccggcggcggttcgtccagcagctctgagccaagcgtgctgaaaaacggttcgcagggctccgcagtcgaaaagctccagaaacgcctcaaggcgctcggctattttgaagaggatgttaccggatatttcggttcttatactgaaaagtgcgtcaaagagtaccagaaggccgccggccttaccgtagacggcatagctggctcggatgtactgggtactatctataaggatgacgccccgaaaaaagaaaacgacaagaaaacacaggataaagcagagcaaagcaacagtaatccccctgcacaggcggccgacaaccaggaagaggtaacaaagaaggaaaccgagcctaagacggagcctgaaacgcaaaaagaaacgaaggcaacaggcccgaaggatgtcgacaagctttcattgggcggcaagggcgctaccgtcaggcagctgcaggaaaggctttccgagctcgcgtattacacaggggaagtgaccggcgtattcgacgaggcgacgctggaagccatgcaggcgtatttccgcgcttcggagctcaagcccgccgatgaaatgacggacgaacagttccaggtgctctgttccgacaaagcggtatccgccgcggactttgaagcgctccagctcaattacgaaggcagcgacgtaacctctttgcagcaggcgctgattaagctgggctatcttgcccccgataaggaaacgggcgtattcgatgacgatacggcaacagccgttaagcttgcgcagacaaactttgcgcttgacgtaacaggcgttgcggacgatagtttcttaaccgcactgagccttgaaacggcccgccagagcacacaggtaagccgtgacattacggcgaaatccgcatccctgacgaacggggcgctcgccaatgcgtcaggcgcggacgcgtttgagcaggttaccttcagcgggcgggacaacagctcttacatactgctcatgtgggtcgccggtatcatgttcctgatttccatgtgctcggtcgtactgttcctcaagagcagaaaaaaagcggctcccgtacagaaaaacattaaaaagtaaaagcggacaagcttctatataaagcaggcgtatgaaacgcctgcttttattttattctaattgactttttctttcatgggccttagactaaaaacaaataggtttgcatgaaaagcaggacgcgattgcaggaggtttttaatgaataaggttaaaattacaatcttaaagacgacgctcgacaaagagctagccgcgcagtatggggctcacggactgaccgcctgccctatgatgaaaaaggggcaggtgttttatgccgattacgcaaagccgataggcttctgtgacgaagcctggaaagcaatctaccagtatgtatttgcactggcgcacggagcaggcggcgacctgttttattatggggattggattaaaacgccgggcgtcgccatatgcagctgcaacgacgggttaaggccggttatttttaagctggaggctactggcgaaacatctcatatggattacgagcctgtccgttgacgcgctaaaaagcaagccgctttctcaaatgaaagcggcttgctttttttgattgggccttcagtctttttggtcgtacgccctgcaggcggcaagaaacccaaaaaagccgaacaaacaggaaaacatcgcgattgccgaccttgttgtgctgtcccaaaacaaataggacgcaaacgacaataaaagcaaacagacgcatacggcaatcattataatggaaaaacgggttaacttcatgggcattcccctcctctccttttcacacgatacggttcacttcggcggcaaaacaattcgcgagcgtcgtaaactgctccattgagagctgttccgcgcggtaattcagcgggataccagatttgtcaagtacttcgccgaccaaatttttttcaagcttcagccctgcggacagggcgtttggaagcgtttttctccgctgggcaaacgcgctctttactaccttgaaaaacagcttttcgtcaagcacgctaaacggcgcgtttttgtgtacatcgaggcggattacagcggaatccacctttggcgcgggcataaagctgcccgccgatacaggaaaaagaacgcgcggctgcgcgtaataccgaaccgcaaccgtgaccgcgccgcattccctcgtccctgcctcggcacaaatccgctgcgcggcctccttctgaaccatgaccgtaattgcatccaccggaagcctctcctcaagcagcttcatgagcaccggagaagtaatataatagggcaggttcgcacagacgcatacgcgcataccaggaaattcttcatcgatttgtttttttaaatcgattttcataacgtcgccgtttatcaccttgacattatcaaaatcccgcagcgtttcatccagtacgggtaaaagccttttgtcaagctcgatggaaacaaccttacccgcacgctttgcaagctcacaggtcagtacgccgatacccgggccgatttcaattacacccatctcctcgttcactccgctttccagcgccatacgcgggcagacggacggattgaccagaaaattctggccgagcgatttggagaaggtaaaaccgtgcctggcaagtatttctttaatattagatatattggaaagctgctgcatatgcttctccttaattataaattgcgcaggcccttagggtacctgttttttaatacgccgcccgagcatttgccaaagcctaacgtcaggccgccggtacagaccgccgtgtatcccttcaagccgtccggtacgcctatctcttccccatgaaggaaccgcataacatcggcgccgccgggtgaaatctctatacttcttcggcattcaccgggcgacgccgccataaacgccgcatgggcaggctccatacgcaagcgtttcagctcaccgagcagtacgcccgcacgcaggatataaagcccgtcaaaatcgggcagcctgtccggtaaaagatacagcctgtcgtttatgaagcgaaaccgctctccaaacggcctgccgggaaagcagtcgtcataaagctcgcttacaagcttctccagttctttttttccgcggaacggggaatcataacggtatggtgcggccgcggttaattctccgtcttttttaaccagccgcgcggcaaaatgcccttccccgccatccatcggcaaaattctcctcgcttttataaacgcaggccggccgaaggatacgtttgcatcttcaagctcaaattcaggatgttcctttaaaaaggcgtctaaaacaccttcgttctcttccctggaaaacgtgcacgtagaatatacgagcaccccgcctggcctaagcgccatggctgcgctgtttaaaatagaaagctggcgcgcggcacatgcgattacatgcgcgcggctccagtcctgggccgcggcctcgtccttgcggaacatgccttctcccgaacacggcgcatcgacaagcaccttatcaaaaaagccgcgcagcttatcacaaagcggctgcggatggcaggaagacacgaccgcgttttttacgcccatacgctctatattggacagcaggacagcagccctgcttttcaccaactcgttcgaccataaaagccctgtattttgtaaggcggcggctatctgtgttgatttcccgccaggcgccgcgcaaaggtcgagcaccctgtcccctttttgcacgtcaagtattgtaactgcgcagcccgcggacggctcctgcatataaaaagcacccgcgtgatgaagcggatgaaatccaagccctttggtgtcaaatggaatataaaacccatctttacaaaactgggacggctttttttcaaatggaagaatttgaaacacccgctcggcatccgttttcagcgtattgatacgaatccctctataatagggtttgcaaagcgcgcgttcatacgctggaaattcttctcccaaaagcatcttcatttcttttataaagttttcaggcagcttaacatccataaatttctccgtcataaaattaagaataaaaaaagcggcagcgcaaatactaagattgcaaagggggtgagctcagtggaattcaacaaccagaacaacaacaacaataacaacaatcagaacagaaaccagaacaacagccagaacagcaacaataacaataacaacaatcagaacagaaaccagaacaacagccagaacaacaacaacaataataatcagaacaaaaaccagaacaataacaacaaccagaacaacaatcagaacaggagcttcaacttctaatctggcgtttgataataccggatacgaaagacggcagttactgcctttcgtgtccggttacatatatttgtgctgcagcaaaagtgtgatactttttagagcttcaaggattatttttgagtaatgcgaatgaaagcggtgatggcaaatatgtaatataccgaaccgctttcgagaagcagtacaaaaaaccaaggaaatcagtagcccagtgtttcgcctatgatgatgacccttatcctccccttatgccgctgctgcgcgcttaccacataattgcagcatacgcggccgtccatatggcagccgtcgcatagaaaggagccgtgcttttttaaagatacgcactcccctgtttcgcggcagccggcgtccatatcgaggcgcacggtgtttgcgggcgcggcctcacgcttgacgcgcacaattgcctcgtcgatgttacggacaatcttattataccccgcgatgatataaacgtgcttcggcccgtaaagaatcgcggaaacacggttgctgttcccgtccacattataaagctcgccgttttccgtaatggcgttagagctgcagaaataagcgtcggcgctgtaggtgtcgcggtacacctgctcaatttcttcctttgtaatgccctgcctgccccggtcgagatactggtaacggccgcttttaagcagctcgagcatacccgcctgcttgagcgtcacggagccgccgctgccggcaaccgctccctgcggaagcattgccgccaccaaggcgcaggcgtccttcgccgtgccgcagtaataagcgtccatattgttgcgcttgaggttctctatcgtcttttgaatgcgcttctcaataatctccctttttatttcctgcatatcgattcctccagccgaaaaagttaactttattatactatgttttatcttattttaaaagagtgaaagtaaaacgaagggggtttcccccgtggattctcttaaacgaacggaaatgtgcctgtttttccttcggtttgtgtgcatgaacggcgatttatcggcaaaaaatattgaaagcaaagccaattaatggtataataacaaaatcatgtaaacacactattcatttgaaaggattcgtatagaatgatgacagttgcaaacaaataccgcacccacctgtgcggtgagctcagggagtctgacctcgggaaagacgtgagggtttccggctgggtggaaaatatccgcgaccacggcggcgtcatgtttcttgacgtgcgcgaccagtacggcgtggtgcaggtcgtcgtccatgaccagacgctgcttcaggacgttaataaggaatgctccgttaccatcagcggcaaggtcgtccaaagggacgaagagacatataacccgaaaatcgcaaccggcacggtggaaatcgtgaccgaaagcctcgaggtcctgggtaaatgcaaaaacaccctgccctttgaggtcatgagctccacggaaacgaaagaggatgtacgcctcaagtaccgtttccttgatttgcgaaataaaaaggtacacgaccatatccttctgcgcagcgaggtcatcgcgtttttgcgcggcaaaatgcaggagctgggctttacggaaatcaacacgcccatcctgtccgccagctcgccggagggcgcgcgcgattacctgattcccagccgcaagcacaagggcaggttttatgcccttcctcaggcgccgcagattttcaagcagcttttgatggtttcgggctttgataaatatttccagatagcgccttgcttccgcgatgaggacgcaagggccgaccgctcaccaggtgagttttaccagctcgatttcgagatggcgttcgcaacccaggaggacgttttcgccatagcggaggaggttttatacgaaaccttccagaggtttacagacaaaacggtttcaaagccgccgtttaggcgcatcccctacagggaagcgatgctcacctatggctccgacaagccggatttgcgcaacccgctcattattaaagatatcagcggcatgtttatagaaacggacttcggccccttccgcaaaaaaacggttcgctccatcaacgtaccaaatgccgccgcccagtcgaaaacatggtttaagaagatggaggagttcgcgctttccatcggcatgaagggcttaggatacgtcaaggtgcgcgacgacatgacgttcgacgggccaatcgacaagttcttaaaggaaggcgaccgtgaaaagctgattgagctaaacggctcaaaggcaggcgacgtaatttactttatcgctgacagcaaggacgctgcgccgaagcttgcgggccaaatccgcacagaggtcgcaaaacgcttaaacctcatcgacgaaagccgctttgagctttgctttatcgtcgatttcccgatgtacgagcacgacgaggacaccggagcgctgattttcacacacaacccgttctccatgccgcagggcggtatggacgcgcttgaaaaccaggagccgacggaaatccttgcctatcagtacgacatcgtctgcaacggcgtggagctttcctccggcgcggtgcgcaaccatgaccttgagattatgataaaggcgttctcccttgcgggctacagcgaagaagagctttcggaaaagttcaccgccctgtataacgccttccagtacggcgcgccgccgcacgcgggcatggcgccaggtatcgacaggatgctgatgctccttaccggggaagagaatatccgcgaggtaattgcattcccgatgaacagcaacgcgcaggacgttttgctcggcgcgcctaatgaggtaagcgagcagcagctgcgcgaggtgcacatcaagctgcgctaaccaataaacattctggccgcgtttgggctttcagcttgcgcggccgtccctatatctccatgaaaggaatgaggcatatggtcacacatgaggacgtcatccagattgcgcgcctggcaaagctctccataccggaggacgggcttgacgcgctgacaaaggacatggcggacattatcaaattcgccgataccatcaacaacgcttccgaagaaggcgaggattttgacaacatcaatcacctttccaatgtgttccgtgaggacgaggtagtcccatcctacgacagcgaagaaattttatgtaacgcaaacgacaaagaggacgggcacttccttgtgaaaaaacgcgtactttaaaggaaaggattgattcccatgggcaaaatagcagaaaccggcaggctgctgctcgaaaaagaactttcgtgcacggaactgacgcaacaatatttaagccagattgaagccgtaaaccaagatttaaacgcatatgttacggtcacgccggaaacagcgctggaaacggcgaaaaaggtcgataaaaaaattgcggcgggcgaagcgctttccccgctcgagggtatcccgatgaccctgaaggacaacatctccaccaaggggattgagacgacctgctgctccaacatattaaagggctacaagcccatctataacgcgaccgtctggaatattttaaaggagcagaacgccgttctgctcggtaagacaaacatggacgaatttgccatgggctcctcctgtgaaacgtcctgcttcggcggcgcgcgcaacccgcacaatttaaaccacgttgcgggcggcagctccggcggcgtagcctcggcggtcggcggcaacattgccgtatacggcctgggttccgacacgggcggctccatccgccagcccgcaagcttctgcggtatcgtcggcatgaagccgacctacggcgcggtttcccgttttggcctgattgcgtacgcctcttccctcgaccaaataggccctgtcaccaccagcgtggaagacgcggcgctcgtatacgacgcgatttcactctacgataaaaaggattccacctcgcagggcagaaaaggcgcgccttgcgcggacacgctcaaaaacgatatcaagggcatgaaaataggcattgcgcgcgaatacatggacggcgtgcgcgacgatgtacgcaaagcaattgaggacgcagtcaaggtgtacgaatcgctcggcgccgaaattgtttacttcgatttacccgcgcttaaatacgcgctgcctgtatactatatcctcgcctgcgcggaggcttcctccaacctcgggcggtatgacggcatacgctacggctacaaaacgccgaaatatatggacgtaaacgacatgatatgcaaaacgcgcagcgagggcttcggcaaagaggtccagcgccggattctgctcggcacgtatgttttgagcgccggctattacgatgcgtattataaaaaggcgcagaatctgcgcggttctattgtaaaagcattccagagggcgtttgagcagtgcgatataatcctggcgccaaccgtgccgatgaccgcgtttgaatgcggcaaggccgtaagcgaccccatcgagacgtacctgaccgatatctgcaccgttccaatcaacatcgcggggcttcccgccgtgtccgtcccctgtggctttaacgcgaagggtatgcccatcggcatgcaggtcatcggcaacagcttctgtgagagcacggtattaaacgccgcatggcagtatgaaaacgccgcgcgcggcgcggtgttcaaatccgcggaaatgggggtacggctatgaaatacgaaatggtagcggggctcgaaacccacatcgagctttcaacgaatacgaaaattttctgcggctgcaccacgcagttcggcggagagccaaacacgcattgctgccccgtatgcatcgggctgccgggcacgctcccaaagctcaaccggcaggtggtcaattacgccattatggcgggccttgccacaaactgcgagattgcgcgcatttccaaaatggaccgtaagaactattgctacccggacttgcccaaggcgtaccagatttcccagtacgatatgccgttgtgcttaaacggctatgtcgagctttctaacggcaggaaaatcaggcttacgagaatccacatcgaggaagacgcgggcaagcttatccacagccacggcgacacttatgtcgactacaaccgcggcggcgttccgctgatagaaattgtcagcgagccggacatccgcagcattgaagaggctaaggaatatgtggaaaagctccagcttattatgaaatacatcggtatttccgactgcaaaatgcaggagggctccatgcgctgcgacgtcaacatttcggtgcgccctgagggcagcgataagctggggacgcgcacggaaatcaaaaacatgaactctatcacctttatggctaaggctatggaatatgaattctcccgccaggtcgatttgatagaaaacggcgggcaggtcgtacaggagacgcttcgctacgacgaggtgaccgacacgacctccagcatgcgcggcaaagaggacgcgcacgactaccgctatttcagggagcctgaccttgtcaccatccacgtgacggatgaagaggtcgaagcattgaaaagagagctgcccgagctgccgggggccaagctcacgcgttacaccgaagagctggaaatcccgcgggcggacgcacagctccttacaaagtacaggaacgtcgccgaatactttgaacaggcaagcgaaggcacgaaaaatccgcgcacggccgcaaatttcatcattggccaggtattccgccgtatggaaaacgacagcgcgaaagaggaatttcatgtttctgtttccgctgaaaatttaaacgagctgatacgaatgctcgacgacggaaaaatcaagatgaacctcgctaagacgacgctcgaaaagatgctcgataccggcaaaaaggcttctgagcttatctcggaaagcgacatgggcggccttgacgatgaggcgctcaccgcgctttgcaggcaggccattgagcaaaaccagaacgccgtaaacgacatcaaaaatggaaaacaaaaggcaatgggcgcgctgctcgggtttattatgaagcaaagccgcggcaaggcggacgcttcagccgcgcaaaacaagctcaaagaattgattggctgattgctattatacaacaagagccggagaaaccaatttgtttctccggctctttctttaatcatttcacaaaatttttttcaaagaaaggtaaggcaataaaaaacagtggcctttgcagctgattacgatgcttctataagctgaaaagcgcatagttactgggtttctaatagaataagcctatatgttaagcggcaatgttgtccaaatgaacaataggagttatggacggcggcatggagctatgatacgaaatgagttgtttgacatttccacaccctgatattagaatgtaaaagttaagttacgcttggtccatggcggataagacgtattcggcaaattttgatttgcatagatgaaaggcggcgcaaacgatggggcaggaaaagaaaaagaaattatctgatatgacgcttgaagaattgtggcagttattccctatccagttgactgcgcataatgaaatatggcaggattactacgagaaaatgaagaaaagcgtagagcaagctctttctgattgctctattgtccgaataagtcatattggcagcaccgctatcaatggtatatgggcaaagccgattgtggatattctggtagaaattgaagaaaatgaggatataaaaaaagcggcggctttcatacagagtataggctttatcccgatgagtacagggccaaaccggatttcacttaatttgggatatacagaaaaaggatttgcggaaaaggtgtatcatttacatattcgccgcaagggcgataatgacgaactctatttcagagattacctgaacgagttcccggaaacagcaaagttatatgaacagctcaagcttagtttgtggaaacaatatgagcataaccgtgacggatatacaaatgcgaaaaccaagttcgtgaataaatatacagaggaagcaaaggcaaagtatttggacagatataattaaaccggaagattcaggtaggtattgaagctttgatttctgttataagcaaaatttcgccaaaagggagcacaatcatattcgattacccggacgagaacagctatactgataaagcgggagaactcgcaaaaaagcaatctatgttggctggtgcggcaaatgaaaaaatgttgggaagctattcccgtttagacatggagcaattgctctccgaccatgattttctgatatatgagcacttaaccccgcaggaaatggccgggcaatattttgagaattataacaaggcaaatccttggaataggatggccgcgtctgataatgtgaattattgccttgcggttagaaaatgagcctttgccctgtaaatttctatttgccggggtgattttttatctgcgccctctttaaaaataccggtaatacaatagtactttgcgtgtacacaccattcaaatcgattgtcgtggaacacgtctcactttctcctgtgaacgcggctgtgattcttttagcagcaaagactataaagctttgttgccttcttgccaatgttcagacagcgggtagccttttgcctgtttccactccggtgaaaagaactccttacatttcgtaagaattccattatattttactttttctcactttacttcgcttttgaatcacgatataatgaaatacagagaatcatcattggaggtaacaatatgaaaacttgtccgaaatgctccgcgcaggtaaaggatggcacaaatttttgtccagcgtgcggcacgcgccttgccgaacctgtaacggcgggcacagcaacgcagcaaacggctccgcagcaggcgcaggcgcctttcagcgaaaatatcaacagccattctgcgtatggtccggcgggagcgccgcagcaaaaccgtacatatacaaatacagcgccgcagcagcaggcgggtccaataccaaaccagggcgctcccaagcagcagccccagcagccgcaccagggacctactcccgtgccgcctccgccgtattaccaaaacgtgaatccaaaccagcggcccggcgaggataggttcaaggaaggctttaacaacgcggtcggcaaaacgaaaaatttctttaataacacggccgatgaaagcaattttcaggactcgcaggacgtacagcagaataaaattcttgcgcttgtcagctatcttgggtactttttctttatccctatgatagtaaagccgcagtcgcgttaccttcgttttcacggtaatcagggcttaacgctgttacttgcggaaattgtactcggcgtcgtgcacgccgtcctgtgcggcctgttcggcctgattgggctggccggtattcccggcgcaatcatcagcggaatatttattgtgctgttgagcatcgcgatttacggcgcaatccttgtatgggtcattctgggtattgtaaacgccgttaccggcaaagcaaaggagctgccgctgataggcaaaatccgcattttaaaagaattttaattaaaatataaggaagcgccccggtcttgctggaccggggcgcccttttctttataaggctttgttatgatactacttgattttcagcaaatactatagacaaaggctttcaagaatttatgggttttattttatttcatgttcttttcgtactgctcgatcatcttcttgaccatctggccgccgacagaacccgcctgacgggacgttaagtcaccgttgtaaccctgcttgaggttaacgccgacttcagaagccgcttccatcttgaaacggtccagagcctctcttgcctcaggaactactacagaattcttagacataatgtttttctctcctttgctttaaatttgtttttacacatatttttcactcgctttgcggtggaaccaacctcttgattaacgccgcaatattattatgtgacgtggttttagatatatagctagaaaaaaatggccttttgttttccgttttttgagatgtaaacaaattacacaaaaaaccgataatatagaatgcagcgcttataatgaaaaaaacgctgcgcatcaaagcaaaacggagaagggatacaatggaacgaagcagctgtgagcggggatttcttgcaatgtcttccctgcttcagaaaatataccgggcaacgccggaaaacgacttaggaagccttttgagcgatttgaatccaatccgcttttcgggtacgcatatttcgtcatttcccgcgttcgaggattacagggatttatatcagaaggaaagggaaaacgggaaaacaaaaatgcaggcgtcctatcacgcatgcatcgattttctttttttatatgaacgggaatttgattttcgtttaaagggcacaatttcccgtttttccctgcgcagttatgaggcggagtttgaaaaacagctttctgcatgacagtacaaagggcggccgtttggccgccctttacattttgccctgttatgccttagccgctgtacgcttcaactcatagataatatcggaacggtttgcaacggtcggggaatgcgttacgataattacgcatttcccctcgtccgcaagctcacgaaggatatgcatgatgtcgttctccgtttctccgtcgaggttgcccgtcggttcgtccgcgaggataacgtcagggtcataggacagcgcccttgcaattgccacgcgctgctgctggccgccggaaagcttcaatacgcgccgttttccctcatcttccgacagccccaccttcctaagcaaatccatcgcatgctcctttttatccttgcgccggacacccgcgatatccatggaaagcactacattttcaagcgccgtcaggtttgtgaggagattaaaattctggaaaacaacgccgacacaatgccgcctgaaatcatacttattgatttttttaatatcctgcgctttatagtaaatcgtacctgccgttggggacgcaagcccggaaagcagggaaagcagcgtcgtctttcccgcaccggatttacctacaatcgaataaattttccccggctcaaagttaaaattcacatgttctaaaacaggctttttatcataggaaaagctcaaatcacaaagatttaaaattgacatctccgttcctcctcaatctctgttggacagtattttaagcggctcgtaccgcatgatgaacaggacagacacaatgctcgcaaccaacgtaagcagaatccctataccgagaagctccagcaatacggtaaagtcggtagcgcttgttacctgcgtaatataatttacagcctgtgacccgataccgcggccgccttcagcctgtgacccgccctgggggagctgcatgccgtcctgcgccagcatatcttccccggagggccgtcccatcgcctgctgccgccggtccgcgctctggctctgtgccgaaacctggctctcgagcagggtgttcgtaaccggcacgcttatcagcgcgccggcagctgagccaattacaatagcgcagagcgtcacggtgaacacctctgtaataaactgctgtgcgaccttacgctttttcatgccgatggccgtaagcacgccgatttcatatttcctgtcgcggatgctgaaaatattgagcactacaagtatgaccgcgccgatgccaagcacgacaagcaggaaataaagcgccatttgtgaaaggttttcaagcggaagaaggctctgttcaaagctcgtgatatcggaagagcttactgtgtaatcgtctgaaagccccaaagcccttgcctgctgttcaaactgttcgtagtcgtccacgctcgcgaaggtgtaggtgcctgaaagctgctcgcgcattgcggtcgaggcttctatctctgtttcctcgccggctgccgcggctgcgttttgggcggaggcgccagtaatctccttgagcgccgtatagctcatataaatttggtttgcggggtcgcttcccgtctggaatccgcccataaagccgcctgacgttacggtagactggctgttgttataaataccgacaattttgatggaatacgtttcgtcctcgtcgttcggattgctgatttctatggtatcgccggccttgagggaattaaaggccgcaagctcgtcggaaatcacgcattcctggctgcctgtaccctcctcaaacatggagccctccgttattttacaggttccgtttaaaaaatctgccattgcgtcgtccgagctgtagccgacgatggtaaaatctccctgtgccccccaacgccccgttttctgcccgccgccctgcatcatgccgccatcgggcatttcgccgccgggggccgttttgctgttatccccctgagttgtatcggaagaatcagaagagtcgccgcttgacgaggtatcctcatccgtcaccggctcaaagccatctgtcccgtccgcggaaacggtcagcgtataataaaaggacttgacgctatcggcctttgcgtaagtctgcatttcgtcaagggaaagggatccctgactgcccatcattttggcaaaatccgatttatcgaattccggcggctctccgctttccgagccgtcggattggctgtcccccatttgcttcatcaaggaagaacggtcaaaggatatctgtgctgttaccgacatggaatcgagcgtctgcccgcgcacattgttcgccgcctggcggatagaaagcccgacgcaggcggaaacggcaataaccagaacgataatgccgattaggatatttctgcccttggaacggctgatgcttctcagtgcgttttttaaaatatacataggtttgcctcctgttttcacattgcaaggcgcattgtaacaggataaccttgaaaaaaacttaaagttttttcctattcaatattttttcaagcttttctgctataatgggaacagaatcaaaaaaagcaggaggcgggaggccttatcttgaaaattttgatagtagaagatgaaaagcagctttgcgaggcgctcgttgcgcttttaaaggataacggctattccgctgacaccgtatatgacgggcaggacgggctggattatgcgctgaccggcgtatacgacgtgattgtgctcgatatcatgctccctattatggacgggctggctatgctgaagaagctaagagaggcgggcagctccgtacccgtactcctgcttacggctaagggcgacgcgcgcgacaaaataaacgggctggacagcggtgcggacgactacctcacaaagccgtttatcgcgggcgagctgcttgcgcgtatccgcgttttgacgcgccggcgcggagaatacgttggcgatacgctctgcttcgggagctgtacgctcgacaaaaacacgcatgagctttcctgtgcgggaaattcgttgaagctcgggcgcaaggagtatgaaacgctcgaaatgctgatgggaaatcccgggcaaattattccaaaggaacggtttatcgaaaaaatctggggctatgacagcgaggcggagtacaacaacatcgaggtatacgtctctttccttcgcaaaaagcttcttgctctacatgcggatattacaatcaaggcggttcgctccgtcggatacaagctggagaatgcggtatgattaaaaaattgcggttaaaattcgtccttgtttccatgagcggcgtgctgctcgtcctggtaatcatcttcgctacacagaattatttgatgataaaaagcagcgaggagcagacaaaccgtctgctccagtccgtcgtcatgaccgatgggaatatggaaaacctgcgccagaaaccggacggcggcgctgtcccccctgataagggccaaaaacccgacggcctgcgccctcccgcgctggaaacgctgcgcggcgcaaaatttttctacgttaagttcgattcaacaggcaatgttttggaaagcgacgtgtcccacatggcggatttaagcgcaagtgacgcggcttcctgtgcacgcagcgcgcttaaatcaggcagccagtccggtgcggccggcggctatcagttcttatgcgggcaaaaggaatacggcaccatcgtcgcgcttgcccagcgcgacgtcgaaacaaatatgctgcgccagctcactacgatttccgccgccgctgtgataggcggagtgctcgtcttccttgtgcttgtactgcttctttcaaagtgggcggtaggccctgtcaaaaccgcttttgagagacagcgccagtttatttcaaacgcggggcacgagctgaaaacgccgattacgattatcgcggcgaactccgatgtcctgcaccgcgaaatcggagacaacaagtggctttcctatatccagaaccagaacgaaagaatggcggcgttggtaaacggcctgcttacgcttgcgcggaccgacgagagccgccagaagccacagcttgagcggttcaatttaagcggcgcctgcatgaactgcgcgctcgaatttgaaagtatcgcgtatgagggcgggaaaacgtttttaacggatatccagccggatatcctaatcaacggaaacgagcccatgataaaacaattgctctatatattaacggacaacgcgctcaagcattccgaccgaaacggcgaggtacgcgtggctctcaagcgtatgggttccaaggccgtgctggaggtttacaacaccggggaaggcattgcgccggaagaacgcgttaaaatatttgagcggttttaccgcagcgacagctcccgctcgcgcgagacgggcgggtatgggctgggcctcgcaatcggcaaatcgattgtggagctgcataagggcaaaatctccgtacagagcgaacagggcaaatggacgcggttcatcgttgtcctgccgggataaattgcacggttactgatacaaaaaagccttaccacgcggcattacgccgcgccgtaaggcttttttatttatcacatcgattacagcagcattcgggctcccttctcagaaaaccgccgctgcatatgggtattataacgcctgctcgggctgaggctctacaaaatcaaagggctccgtgttgttcccaaacttgcggaaccgctcgtaacgctgccgtaaaagctcatccgcgtccatttggcggtacttttcaaatgtgcgcagtatcagccccttgaggctttcaaacattttgctgtcctttgttttcggctcacgtatgattcgttcaatgacctgcatcttgaacaaatcctgcgcggtcagctttaagcattcggcagcctccgccatctttgtggaatctttccacaaaatgctcgcgcagccctcgggagagataacggaatacaccgcgttttcaagcatccaaacctcatccgcaagcgccagccccagcgcgccgccgctgccgccctcaccaatcaggatggatagcaccggggtttttaaagcggacatttcaaacaaattttccgcgattgcctggccttggccgcgctcctccgcgccgatgccgcagaacgctccgctcgtgtctacaaaacacaaaacggggcggccgaacttctccgcctgcttcatcaggcgcagcgccttgcggtagccctccggatgcgcggagccaaaattgcgctccatgcgctcctttgtgtcccttcccttttccagtccaataactgtgaccggcatatcgtaaagctgcgcgattccaccgataacggctttatcgtcaccaaaacggcggtcgccgtgcagctcaaaaaagctgtctccaaacaggctgctgatataatcgatagtcgtaagcctgctgttggaacgtgcttgcgtaaccttgtcaaatgcgctcatttcctgcaccccctatgcttcttccgccggacaaaccgtatggagctttagcagctttataagcgcgccctttaagtccctgcgcgggacgaccgcgtcaataaagcctttttccattacgaattccgaggtctggaaatttttcgggagcttctgccggattgtctgctcaatgacgcgcggcccggcaaatccgacaagcgcgttcggctcggcaaggataatgtcgccctccattgcaaagctcgccgttacgccgccggtcgtggggtcggtcagaacggtaatataaagcaggcccgcgtcgctgtggcgttttgccgcggcactcgtttttgccatctgcatcagggataaaatcccctcctgcatcctggcaccgccggatacggtgcatataacaatcgggagctcatgctgcgttgcgtattcaaacgcgcaggtaatcttctcgcccgttaccgtgcccatgcttcccatcataaagccggggtccattgcggcaaacacggtctttatcccgccgatttccgcaacgccggtaataaccgactcgttttcgccgcttttgagcttacagctttgcagcttcctgtcgtattcgggaaagccgagcaggttttgcgactgcatttcgccgtttgcctcttcaaatgtctcccggtcgcataaaagcgcaatgcgttccctggccgaaagcctcaggtggtgcccgcatttgacgcataccttatggttttcctccaagtcggaggcgagcagcagcgttttgcaggtagggcattttacccacatggtttcgggaatgtaagggcggctgtcgtccttttcctgcggggcgctctgctccccttccagctcgtttttcggctttaagaaagtgaaaaaatcgccgtttatcatatgcgcaacattccaatcatacaaaatttatcgcagcatgccccatgtgggcatttcattcaatcactggcggattttattcctgttcttccatttgttcctttttcttcgcttcccttttcagcatcaggtcggtcgtataggtgccggccacgaattccgggtcggaaagcagttcaatctgcaaatccctgttgtgttccacaccatggatattaagctcgcttaacgccatcttcattttgcggatggcctgttcccttgtccttgcctggacaatcagctttcctatcatggaatcataaaaaggcgggatttcatagtcctggaaaatcgacgtatcaaaccgtacgcacgggccgcctggaatatgcagtttatatattttaccacagctcgggcggaaatcaaggtccggattttccgcgttaatcctgcattctatagcatttccatgtatgtaaatcttatcctgcgtcatggtaagctcgctgccggccgcaatgcggatttgccactggaccaaatcgagccctgtgaccatttccgtcacggggtgctccacctgcaggcgcgtgttcatttccataaaataaaaattgccgtgctggtcgagcaaaaattcaacggtgcccgcgttgacgtaatgtacggcctgcgccgccttgcgcgcggcctccatcattttaagcctggtgtcaacgctgatggcgggcgacgggctttcctcaatgagcttttggtttttgcgctggacggagcactcgcgttcgcccaggcacagcacgttgccgtgcttgtcgcacaaaagctgcatttcgatgtgctttaccggatataaaaatttctccatataaacggcgccgtcgccaaacgcgcttttcgcctcgctggaggcggaattgaacgcgttttcgaactcgtccatgcagtctacgcggcggattcccctgccgccgccgccggaacgcgctttaatcagcagcgggaagccaattttcttcgcttcttccttcgccgcttcaacgtcttcaacaatgtcgcagccgggtgttacgggaacgcccgcatcgcgcatggttttgcgcgccatatccttatcgccgagcagggaaatcatttcgctgctcgggccgatgaattctatattgcactgctcgcacagagacacgaattttgcgttttcagacagcaggccgtagcccgggtggattgcctgcgcgccggttgcgacggcaaccgtcaaaatagccgccatattgaggtagctgtccgttacctgcggcccgccgacgcagtagctttcgtcggctagctgcacgtgcatggcatccttatccgcctgcgaataaatcgcgacggttgcaattcccatctctctgcaagccctaatgatacgaacggcgatttcgccgcggtttgcaatcaatatcttggaaaacaaatcgattcccccattaagcggtccggtgccgcgtaaataattggtttattcaccgtcgccgacgagcgcaaacgcaaattcggccgatacgcagagcttgccgcccaccgttccctttgcctctaaaaaatagaacgcgccgcggttttttacaagcgtacagacagattccagcgtgtcgccgggaagcaccttgtttttaaattttacgttgttaagcttcgtaaaatacggcgttgccccctgtgcctttcccgctaaaagcacgcagcttgcctgcgccatcatttcacacaggataacccccgggacgaccgggttgccgggaaaatggccctttaaaaagaactcgtcgccctttaccgtatattttccccttgaggtgttctcatctatgacctccgcttcctcgacgagcagcatattgtcgcggtgcggaataatttttttaatttcctcctggttcacataaacacatccttatgccaaacggctcatttaattttaaacaggggctggccgaactcgacgatatcgccgttgtgcgcgcagacctccgtgattgtgccgctctgtgtagcggtgatttcgttcatcagcttcatcgcctcgatgatgcagattacgtcgcccttctttacggaagagccaaccgtcacatacggctgcgcgtcgggagaagccgccgcataaaacacgccgaccatcggagcagtaatggaagcgccgccgtcgtccggctgtgtttcaggcgccgcgcttattacaggcgcctgggccgcctgcgcgggcgctgccgcctctgcgggcgcacccgcctgcatgacgacggatttttctttctttatggtcagcttttcgccgtctatcccctttatctcaaaacaggtcacgcctgtctggtcgatggtctttatcagctccttgagctcgctgaggtcatacattggcattattaactccccttttgcttgatatggaatcaggcggctttagtccgcacatttttttaaatacgatacacgcgttatgtccgccgaagccgagcgacgtggacattgcgtaatctaccttctgttctgccgctttgttcggaatgtaattgaggtcgcagtcctcatcgggtacctcgtagccgatggtcggaggaagcacgccggattcaagcgctttcgcacagataaccgcctcagcgccgcccgccgctccgagcatatgcccagtcatagactttgtggagctgatataaagctccctggcgcgctgctgcccgaatacccgcttgaaggccatcgtctcgaccttgtcgttcgggggtgtgctggttccgtgcgcgttgatataaattttatcgttatccccgacgccagcttcctttgcggcgattgcaacggcgcgcgccgcgccgtctccgtccggttcgggcgccgttacatggtacgcgtcgcaggtgttgccgtagccgcagatttccgcgtaaattttcgcgccgcgctgtttcgcgtgctcgtaatcctctaaaatcacaataccggcgccttcgcctattacaaagccgtcgcgccgcttatcaaacgggatggatgccgttttggggtcgttgcgcgtggaaagcgccattatgtttgaaaatccagcgatggaaagccggttgattgccgcttccgcgccgcccgcgatgattgcgtcggcatatccgccggcgattgcgtggaacgcctctccgatggaatgcgtacctgtcgcgcaggccgtcacaatcggaaggcacacgcccttcgcgttttgcttgattgcaatcgtgccggacgccatatttccaatcatcatcgggacaaagaacggggaaacctttttcggaccctgctgttccatgttgttgcagttgttgataaacgtctgcatcccgccaatacccgcgccgacataaacgccgaaacggtccggatcgattttaccgtcgataccgctgtcgcttaccgcctgtgccgccgccgctaccgcgtactgcgtaaagaggtctgtcttgcgcagctcccgtttttcaatatactgggttgcgtcaaaatccttgacctccgctgcaattgttacctttaaatcggaggtatcgaactttttaataaaatcgattccgcttctgccatttatcagggaatcccatgtggtctgtacgtcgttgccgactggcgtaaccgcgccgagtccggtgactactactcttctcattgggctctctccttccgctgtggtttcttacattgccatgccgccgtccacgcgcagcacctcgcccgtgatataggccgcttcgtcgcttgcaaggaacgcgacggcgttggcgacgtcctgtacgctgcccggctttctcatgggaatgagcgccgtgaaattctccttcaccttgtcgctcaggttttttgtcatatcggtatcgatatagccgggcgctaccgcgttgcaggtaatccccctgccgccgagctccttggcgaccgtctttgtaaggccgatcaagcccgccttcgcgcttacatagtttgcctgccccgcgttgccgccgagcgctacgacggagctgatgttgacaatcctgccgctccttctcttcatgaagtgcgtgtaaaggtgcttaatcatgttgaacgcgcctttgaggttgacgcttaaaaccgcgtcgaaatcctgctccttcatggagcgcagcgtcgcgtcgcggacaatgccggcgttattgattaaaatatcgaccgcgccgaaggcttcgattaccttgtccaccgtttcctttacgccgtcgtagcttgaaacgtcacaggtgtaaacctcacatttcacgccgagctctgtaatctcctgctttgtctttgcggcgttttcgtcgtcgcctatctggagaatcgcgatattcgcgccgtcctttgcgagcgtcagggcaatttccctgccgattcccctggaaccgcccgtaacaatggctgttttatcctgaaatctcatggttgctccgtcctttccgtttcttgtccggttttatgtaaatcaaagaagctgcgccttgcattcattaagcgtcgccttgtcctccacatggcaggcgtttacgtttgcatcgattttcttaaccagtcccgtcagcgttttgccggggccgcactcaataaaggtatctacgcccgctatgataaggttttcaaccgttttctgccactgtaccgggctttttgcctggtttataatcagctctttatagtcgccgccgtagggctgcgcggttacattggaataaacggggatttgcggctcggagagcggaatatttttaagataagccgcaagtccgtttgacgcgctttccataaacgggctgtggaacgcgccgcttaccgccaggcgcaccgccttgcccctttgctccttaaccgcggcggaaaattcctccacgagcgtttcatccatcgcaacgaccgtctgcgccgggctgttaaaatttacaggccaggcgttgtcaaagcccttgcacagctgctctaccttttggggcgaaagcttcatgaccgcgaccatagcgcccctgctttttgcggcggcgtcgtccatcagccgcgcgcgtttgcagacaagctcaaacgccccttcctttgacaggattccggaaaagccaagcgccgcgatttccccaagggaaaagcccgcgatatagtcgggcgtaattccaagctcttctgccgcgcaggccgcagccaaatcaaccgcgaacacgcacggctgggtatttaccgtcagggaaagctcctctttttccgctgtaaagcactgcttagacgtaccgggacgaagcttgtccgccatatcgaaaaccgctttcgcggcgggggagcattcgtaaagctccctgcccattccggtgtactgtgcgccctggccggaaaaaacaaacgctattttacccatttgattgcaccgcccaatacttcctccgcctgggtgaacatctcttcgatgatttcctttgcgggctgttcctttttgaccatcgcggctacctgccccgcggggacgcagccgtttgatacgtcgccgccgcgcgctgccttgcgcaggacgccgaggcccatattttccagctcctcgtctgtaatttcgctgttatattcttttttgagatattcccttgtaaacgcgtttttcagggaacgcacggggtggcccagccgcttgcccgtgagcaccgtgtcgatgtccttcgcctttaaaaccctgtccttatattcctgcgcaatggtgcattccgttgcgacaagaaaacgcgtaccgacctgtacgcctacggccccgagcataagcgccgccgcgagctgcctgccgtccgctatgccgcccgccgctatgacgggaatgtccaccgtgtctactatctgcggaacgagcgccattgtcgtcaaatccccgacgtggccgccggactcgccgccctccgcgatgaccgcgaacgccccgtggcgctgcgcaagctttgcgagcgcgacggacgggacgaccgggattaccttgataccggccgcaagccattccttcatatatttgccgggattgcccgccccggtcgttacgactgggattttctcctcggcgacgaccttagcgacctcttcgacaaacgggctcatgagcatgacgtttacgccgaagggcttatccgtaagctccctgcattttataatttcggcgcggagctggtctccgtttgagttcattcccgcgatgatgccaagcccgcccgcgttgctgacgcccgccgctaaagacgcgtccgcaacccaagccattccgccctggaaaatcgggtatttgatgcctaactgttcgtttatcggtgtacttatcataataaaacctccgtcgtgtttggccaagccttttaaatatcccagcgcagtacgcagctgcccatcgtaaggccgcccccgaacgcgcacatcgcaatatactcgcccttttcgaatttacccgcgcggtatgcctcgtcaaggcacatcggcatgcaggaagcggacgtgttgccgtaatgcgcaatattataaatgtaacggtctgcgggaatatcgagctttgccgccgccgtatcgattattctcgtattcgcctggtgcggtaccacatggccgatgtcgctttgcgcaagccccgcttcgctcacggcgcgcttgattccgtctaccatcgcgctgacggcaaatttatagacctcatgcccgttcataaaaatgaccgggctctctgacgggtgcttataaaagggcgaggtgttttcccccttgggcgcgtaaaggacctcggggttgccctgtgccattacatagatggaacgcaggccgtcgccttcagaaagcaccaccgcgcccgcgccgtccccaaacagcacgcaggttccgcggtcggtccagtcggtcatattggaaaggttgtccgccgcgataacgagcacctttttcacttttttcgatacaaaaaagccatccgccacgtcgagcgcgtaaataaagccggagcacgcgccgtttatgtcgaacgcagggcacgacgccccgatttcacgctgtacaacacacgcctgcgccggagtaatgtaatctccccgcagcgtcgcgcagataatcaaatcgagctcgcccggagtaatcttggcgcactccatcgcgttttttgccgccgcgacgcacaaatcggtcagagtttctgttgtacagatatgccgctcgtgcacgccggtgcgttttgttatccattcgtcgctcgtttctaccatggtggagagcttttcgttggttaatatgtactccggaacgctcctgcccgttcctataatgctgaagctcatgatttcagtcctccgttttccatctttttaagccgcgcgctcaaaaagacattcattctatcaatacagccgagcaaaatccctttttcctgctgtgtcattccggcggtgatgctttttgcaaggctcttatggaaccgcttgtgaatccggtctgcgtggcgcccctcatccgtgagctgcacgtacacctgccttccgtcctccagactttttttcttgacggcatagcccttttttaccagcttgtttacagcaatggtaacggacgacggcgtaatcatcagttcacccgcaatatcgccgataagccgcccgcgtatgggatttttgttgattacttcaatcaggtgcagctcgctgatggaaaggttaaagcgctttgagcgcatcagcgtgttctgctccactctggaaaacagcgaatagctctgttccagcacgaaatttaagcggtcgcaaaaatcctctcccatttatttcagctcctctcggagaaatagtttgactacttaactaattttatctccgccgcgcctgtttgtcaagaaaagaaatgaacaacaacagtgctgtattcttattttacctttataatatatttcacgtgcgttttttgtaataatatggtttttctgacagtttcgttagctgcatgattaaattgcgccgcagccgcatcaactgcagtaatcctggagcaggcggtcaagctcccttttgccctgcgctttgataccctctccctttaactgcttctggtcgagcaccggaagcgccgacacctccgattccgtcaccttgaacggcgtttcgctgccttcttcataaacggcaattctcccattataatccttgagataatacaccttttcataaatggttttcggcgtggtacccacatctgtctgcgcggcggtctgagccggccaaatggttgcggccaacgcggaaactgctattacgccaaaaaagatgcatactaagatagcggcatatttttgtacatccttttttgtcaaaacccgatcccttcctttctttcactgcaaaaaaatcctttgtattattattgcaattgtgcatctgctttatacaggaaggccgcgcgcggttcaatttaacaaaatattaaagaaataatgccgaaaaaacatttcatttttctttgggaagtgttataatgtggattagttatatattcttccagggacggttccgccctttttcgggcgctgcgttccgtttattttttaaaaatacagggaggtcggctatacgatgagaaaaaccgacatcaataaatttaccgatgaaacaggccttgaaacggcgggtgaaaatgccgcggtcaagggaacgaaaggatttttatccgtcgtctggaaggtggtttccaccctcctgatgattttgctgattgcctgcgtagtcgtcggcgtttccgtatctatctatctgttcgggcttgcaaacgaaccgaccggtatcgacttgaacgcctccaagctgcagctgacgagctttatctatgtcaacggcaaggacggcaagccggtggaataccagcggctgcacagtacggaaaaccgtgtctgggtcgattatgaagatattcccaagcagatgaaggacgcgatggtcgccattgaggacaagcgtttctatgagcacagcggcgtggactgggtccgcaccatgggcgccgttttaaaccttgcgtccggctcggacggatacggcggctccacgctgacgcagcagctcattaaaaatatcaccgacgataacgcggtaagcattaccagaaagctcagggaaatcttccgtgcgcttaatttggagcgtgaatttacaaaggaccaaattttagaggcataccttaacgtcgtgaactttggaagcggctgccgcggcgtacaggcggcggcgcacctctatttcggcaaggatatccaggactgctccattgcgcagtgcgcggctatcgccggcattacgcagaacccggcggcttacacaccgctcgattatccggagaataacaaggagcgccgcgaaaccgtccttggcgaaatgtataaccagaagaaaatcagcaaggaagaatacgaccaggcaatgaaagagtcgcagaacatgaaattcgtcggctttgtagaagacgacgaggacgacgaagacgacgaggacgatgtaccaaattggtatatcgacgcgcttttccgcgacctgcgctccgacctggcgaaggagctcaatatcagtgaagattccgcggagcgcaagctgtatacggaaggcctgaatatttactgcgccatggatgtggacatgcagaattacgcggagcaatatgtattgaacgtcgaaacgccaaacgacccgaatcttcaaatgggtttggtcatgatggattttgacggccgcgtcatcgcgacggtcggcagccgaacgaaaaaggacggcatgctgctttgggacagggcgaacatttcagcgctgcagcccggttcttcgataaagcctgtatttgtctatcccctcgctattgaaaacaaaaagctcaatttctcttcctacgtagacgataccccgtttgaccgctggtcgctcgatgagtacggaaactggaaagccggaccgaataattccggacagatttatcatggcatgtggccgctgccagacgcgattgaggaatccctgaatgccgcggcggcacagaccatgcaggagctggtcggcccgaaaaacgcctataaccaggcaatcaataaaatgggctttacccatctttcaacgcaggattccgagaacatcggcgcgctgtccctgggcggcctgaacggcggcgcgaccgtcagggaaatggtcgcttcctaccagtacatgggcaacggcggaaaatattatgagccctatacctattattatgtaacaaaccaggacggcgacgtgatactcgacaaccgcgagaacatcccaacgcaggcatattcgaccgaaaccgcgaccattatgaaccgcctgctgcactataatatgcaatataccaatttcagccatacggctgccggattggcggccatagacggctgggatattatcggtaagaccggtacgaccgataaagacaaggaccattggttcattggcatgtccccatatgcaatcatgggaacatgggtgggctttgaccagccggcgtcaattaccggaagcgacagcaagcatgtagcggagctgaccttccatgctttaatgtcgcaatacctgaaggataaaaatccgaaggaatatacgctcgcgccggatgtcgaggcgattccctactgccacgacacagggctgctcgcgaccagcggctgcggcaatacctatatgggctattatacggaagacaaccggcccgattattgctacggcggtcacagctattatgattacagcggcggcaattcggacggttacgacgacgactacacgagcagctatgaaccgcccgcctcatcggacactccgtctgacaccacaagcgagccggtaccgtccgacgaaccctcgtcatctgaggcgccgcccgacagtacgcccgacagcggcgactccggcggcgaaagcggcggcggtgactccggcgggggcgatatcccggtggataatcccgcagattaaccaactaggccatgcggcagtataatagtatggtaaataacttttacgataagaggtgcaaaatggtacaggtagcaattatgggctatggagtggtaggctccggcgttgcggaaattttgcagacgcacaaaaaaagcctggagaaaaaggcgcaggaggaaataggaatcaagtatatccttgatttacgggatttccccggcgacccgcttgcagataaattcaccaaggactttaacgatatattgaacgacggcgaggtttccgtcgtcgtcgagacgatgggcggcctctcatatgcctaccagtatgtaaaaagcctgctggaacacggcaagagcgtcgttacatcgaataaagagctggtcgccgcaaaaggcgcggagcttttacaaattgcggcagacaaaaacgtaaacttcctgtttgaggcaagcgtcggcggcggtatcccgattatcaggcccataagccagtgccttgccgcaaacgaaatcgaccagattgccggtattctaaacggaacgacaaactttatactaaccaagatgatacacgagcagatgggctttgacgaggctttaaagcttgcccagcagctcggttacgcggaaaaagacccgaccgctgatattgagggcttcgattccgtccggaaaatctgcatccttgcgtcccttaccttcggcaagcatgtctatcccgacaatatccatacggagggcattacaaaaattacgccggaggatgtggagtacgcagcctcctggggcggtgtgattaagctcatcggcagtgtgaaaatgcttgaggacgggcggattgatattttcgtctcccctatgtttattgaaaacgaaagccagcttgcgggcgtgagcgatgtattcaacggcattatggtgcgcggcgacgccaccggcgacgtcgtgttctatggtaagggcgcgggcaagcttccaacggcaagcgccgtggtcgcggatgtaatcgactgtatcaagcaccgaaaacagcgcaaatacctttactggacagacagcgaggaaaactatgtgctcccgtgggaagaaggcacagccgctatgtacattagggcgtttgccccaaacaccgacgaaacatatgtaaaaatcaaggaaattttcggcgaggtgcagatgctcagccggaacggcgagcaggacgacgaatttgcctttgtaacagaagaaaaaacgattggtgaaatactgaaagaggccggtgcgtttgaacaggcaggcgcgcgtatcgtctctaaaatcagaattggtgacctttaaacatgattaggatacaagtaccggctacaagcgcaaatttaggctcaggctttgacagcctgggcattgctttgactatgtataaccaggtttatatggaggtctgcgaccaaatcgacatttcgtcgaatgacggcgtcgatatcccgacagatgaattaaacctgatttactggtcggcaaaacacctgtatgaggagtgcggcaagaagctgcccggcctaaaaattatacaggaaaacaacattcccatgacgcgtgggctcggaagcagcagcgcgtgtatcgtagcaggcctgattggggcgaaccgctttcttggcactccgctgggcgcgcaggatttaattaatcttgccgcaaaaatggaagggcatcccgacaacaccacgcccgcgctgatgggcgggctcgtcacctccgcgatggacggcgggcgtatttacagcgtaagcgtcccggtcgcgcacaatatccggttcggcgttttcatcccgccatttgagctgaaaaccgaggttgcaaggggcgttttgcctgaacaatattcaagggaggacgcggtatataatttgtcgcgcagcgcgctgatgacctcttccctcttttcaggcagcctgcagaacctgcgcgtcgccgtgcaggataagctgcaccagccgtaccgcaaatcgtttatccccgggcttgataccgtctttcgcttaagctatgagcttggctcctatggtacatacatcagcggagcggggccgaccatcatatcgattacagacgaaaaaggaatcggcgttttcagggagcacgccctttcttcccttgaggaaaaaggcatctccggctggcggtttgaagagctgcgcgcagacagcgccggtgcaaaaattatgattgattaagctttccatattgacattttctttgctaccccttacaatcttttctggatatttttgttcaaaaaccctatggggttccaatacactggaggtattcaaatgagcctaatcgtacagaaattcggcggcagctccgttgccaatgccgagcgcgttttcaacgtcgcccgcattgtgacggatacctataaaaagggaaacagcgtcgtcgttgtcgtatccgcgcagggcgacaccacggacgacctaatcgccaaagcggaagaaatcaacccgaacgcttcaaaaagggaacgcgatatgcttttatcggctggcgaacaaatttcgatttccctgcttgccatggcgattgaaaaacttggctgtcctgtcctttccctgcttggctggcaggccggatttcagacgacctccgcacatacgaacgcgcggattaaacggattgaaacggagcgcatacagcgcgcaattgacaaaaacagtattgttatcgtcgcgggctttcagggactcgaccgctacaacgatgttacgacgcttggccggggcggttctgacacaagcgccgttgcaatcgcggctgccatgcacgccgacctttgccagatttacacagacgtggagggtgtttataccgccgacccgcgcaaaatcaaaaacgcgcagaagctcaaggaaatctcttatgatgaaatgctggagcttgcgaccctgggagcgcaggtgcttcataaccgcagcgtagaaatggccaaaaaatataatatcgagctcgaggtgctttcaagcctgacttgcgcacccggcaccattgttaaggaggcagttaatgtggaagaaatgttgataagcggtgtagcgaaggataccgacgtagcgaggatatcggttacgggcgtacccgacaggccgggccttgcgtttaaaatgttctctaagctttccgcaaaggatatcaatgtcgacgtcattctccagtctatcgggcgggacgacacaaaggacatttccttcacggttgccaaggaaaagggcggcgaagcggtcgaaattttaggcgaatacattaaaaccatcggtgcgaagaatgtattgtatgacgataaggtcgcaaaaatttccattgtcggcgcgggtatggaaagccatgcgggcgtcgcttccaaaatgtttgaagcgctttatgacgcgcagataaatatccagatgatttcgaccagtgaaatcaaggtttccgtcctgattgacgtaaacgacgcggaccgcgccgtcagcgcaatccacgccagattctttggcgaataagcgcaaattttaaattgacaaatgcattgccgcatgatataatcataaaacggtggcggataatacgccaccgtaaattatccgggtgtagcgcagtttggtagcgcgcttgaatggggttcaagaggccgctggttcgactccagtcactcggaccaaataaaacctttgaaaacgacttatttatgccgttttcaaaggtttttcttttttcattataagccgaacatttattctaaatcactataaaaacagggaaaataattgacggttactacaagaatctgcttgatttcagcacaatggaagccatgtatctaacaaccatcaaagcaaccattgttattgttgtgagtccctttaaaaatggtactcagccccctccaaaataaccgattaaaatttccttgatataatgataccggcgcgcatacgagttctctacacgaatcagctcaaagttgtgctgtttgcaaatttcctgtttcttgcggtcgcgcttttttacggtcgcgtcttctgcatgctccttgccgtccagctcgattgccagtaccggaatctccattttatcaacggttctttcataaacgacaaaatcaaaacgtcccgtgtagaataaatcagaataggacggattatcccggaatacgtgtgccactgaaacctctttgtgaatgacataccggtgctccgccggtaaaatatttttcatggcatgattgagattttctaaaaacgccgcttctgtctccgtactgtatggcttaattcccaatgctctggaaaacgccgtgcgctgcgttacttttgacgtcccttttgtacgcacataatcaatcagctcataaaggtcgtcgtcgctgtcgttatggagccggtcaagatttttaccgcttgccaagacgacgagcttctctttcggacgcgataccgcaacattaatcagctctttgttgtttttcagccaatcgtaggtacgctggtgtgtctggtcggtaatgccgagggaaaacaggataacgtctttttcatcgccctgaaaggcatggactgtaccgcaggttacatcggcatagccgtattcacgcaggccttcgttgataagcttgcgctgattggcaaacggcgtgataattccaatttttttgccgcggttttggccaatataatttaaaacctgctgcacctcgctgggtgatgtgtttttaacgcttgtcgcagcgtcctgcatatcaacgtaaacaagtggctcttccccagccgcgcggctctcgattttcagtttgccgttataatattttttattattgaattctataattttcgggtggcaccggtaatggtgccgcagaagcacctcgtcgctgaccgcgtcgcaggcaaggtatgttttataaatggaattggatatgtaatcatattcctccgatacggcatattttttgcgaagtttctgattcaccgccggatcgagcaggataacgggattaagctgctgcgggtcgcccaccagcatcaaattgttcccacggacaaccggtaccagcgataccgccgtattgcactggctcgcctcgtccataatcaccatatcgaaatacggctttggcccgcctatcctgtgcgctgaaatgcaggtggtcgcgacaatcggaaaaacacgcaaaaactttttgacgttttcctctgaacttaagtattgatggaaagcctgcacacgctcttcttcgtcagcctccaaatataaaatatcgagtaaatccttatttttgggctcatcgaggcgtttgatgtatttcgccgaagtataatacaaatattttttgaactcttccgtgtcgtctgtcagcagctttaaagcgtcctcatcccgaatttcaccgatttccttgagacgcgcatcaattgcggccaactgccggccgtggagctcatattggaaatggagctgtttattcgcgtttagaaggctttcaaccacctcccggcgttcgcgcaggtccagaatttcttcatattgcttaagcaggcttgtaagctgctgcgtctgcctgatttttgcatcgcggtttttattcagggtctggtcaaaaatattgagagaacgtgttttttcatataactgccgcataaaacgcagggcctcacaaaccttttcctgatttccaagccgtaccatcggaaaaggaatcgtcgtgtttttatatggcagtccctgcaaacggtcgaaaaccccgtcaatcggatggttgttaaacgatgcaaacagaaccgtacgcccattgaaaaaagcggtcaaaattgtattgagaatcgtattggtcttacccgttcccggcgggccctgtacataagacagcggatatttcatggcgttgttgattgccaaaagctggtcgaggttgacgcgcttgtcgagcaaagcgggcggatagtctttacgccttacagggcgctttaaaaaatcgccaaaaaatgctttgaccggtattgtcgcattgtcttcatggtacatgccgaggattgcgccgtattctttgttcaggtccagcggaaagtccataccaattgcaataaggtaaggcatatcgtccacaccttgaatttggcggttattctttgtgatacaatctttgatttgctccgcgttttttttaaaatcattgagcaaatcgtattcatccacatccaaaaactgcctgatactctgcttttccccatcaatcgtaaattcccggcagacggtaatctcatcatccgcgcgcaggcttttatgctttacatccaaatggagcttttgataagccagaacatacagcccttgccttttcggaatactgcaaacattcagcgccagctgttttatccgcgccgcgttttttttctttgtttccgtgtattgaaaatactttacaatttcacaaaattgcgcgtcatccagcgtataatccccgtgcgcaaagctgtcgccgtccagacgttcgattaaagcgtaatcgcattggtaaggaattgcgtccatacggtagcagtccgccagataattgagaatctgtaaatttggcacatgctcaaaaagtgtccggtatttatggggattgcagcgaatatcgtctaccagctgctgattgactgggcaataggttccctctaaaacggaagaagacaggatagaatcgatatatatcgttaaattcagaaccgtaagccttcccaggtgcagcccatcaaccgtcaggctgcggcgggaaaaatcgagcccctttattccaatccaatattttgtctcttgcccatccttatttttatacgcgatacttagccattttccttcatgaattgctctgaaaatgtctttacagacgccgttcacttctccgcctcctttgccgccgccggaataaaacgatgctatatcattatatttgaactataaaaccagtttacttggttttattcaaaatttcaacattaaaattaaacaaattgcataattacaaaacaatttacagcattaaacggcattatagctgtatatcagtaatctatttttatcagccgctttgtaaataactttcgtatttgcagaatgtacctctggtaaaccagttgctgtataagtgttttataccaaatcagaagcgctgttcctttttctatcttgtagattcctacggaaaatggaaaaacgcttgacaaattcttacagtccccatataataaaaatataaatgaatttggcaaagtcagtgaaagctgatgacgcaaagctatgagtctacggcaaataatgctacgattgtcaagctgcaaacccaaacggtttgcagcttctttttttggaggagaacgctatgaaaaaaacagtttctgtcatcctggcactttcggtcataatgggattattcctatgctttcccacagcgggcgcgcagacgctcgacaaggataaaatcaaacccggcgacgtggtagacgctgtaaaatacgatgtggcttccggaacgtacacctatggtacgatatctattaagtcacataccccggagggtgtctccaccgcatacaatgttcttgatgaaaacaatttcaaggcgtctgagggcactgtcagcgacaccatcaaaaataaaatttctatgattgagcagagcaccaacaccgtgtttgaaaaccgcagaaacgaagtaaatctcggtaaatttgggcgcgtcgattctgaatcgtggaaatattcggtagccatcgccccttatgtcattcccatgctggaagcacagggtttctcacgtgatgaaaacatatggatggcatacggcaacggcaagggtactgttctcaaggtctggattaccgtaaataccgcggatacagcgcccacaggcgagaaaataaatgtcggcgttgttacgccgaagaaaatgtctatccgcctgcaggacggcagcatccttaaaaccggcgactcctttgacatagcggcaggccagaccattaaattccagatgtgctcaaataactgggataacgatatttatgacgacaacggtaacggccttgccggaacggtcgtatattccgtctctgtctccagccggtacgatgaaagaagctacgacccggacagcaagacctttatcctccccaagggcgaccctgtcctgaggacggacgtcaattcctgctttatggcttataaataccatttcaggaaaggcgactacaataaacagaccggtatttcaaacgttgtaaacacgccgcttgaaagcttgtccgttaacctcccgctcggctctaccatcacatccgacgcatacaaggcgttcaatcagatagacaccgcacgcgtctttattgaaaccggcgaggataaaaccctctcctataccgactattattgggaatactgatttttaaaaaaataatatgcgcgccgtttctcatgaagcggcgcgctgtttttgtttatggaatcatgataagcaggaaagcaggtgattcatttcttctattcccttgcactgtgaagtaataatttgcttgagaatcggaatgagcggcgcgcagatgtcataacgtaacgcattttttgacatgcacacggccccttcatgatgcggaagcatttgccgcagaaaatcggcgtcaaccgagttgctttcgcgggcacagcgcatttgtgaaaacatggtattgataatttgcttgtagcacttttgatattgcatggaatcacacgccgtattttgaacagcgctgcagcaatcctgtattttccgcatgttttcgatgctttccttctgggagctgataatatgggaagcaatctgtatcaaccgcggttctttcgtatattttaggatatttgcagacatctcaacggcagccatgtgatgcggaatcatctgcatgatgaagttcccggaaatactgtccgtcaggcacacgcccgtcattttcttaaccatccgtcccaaaatttcgcagtagcgttcctgatattttccgacatcctcggtccatccattgtttttctgcatgttatcccttccttttgctttatactatgataagagatgaaaaaatgtgccatcgtatggaaagcgtaactctgccgacctatttctttccgccgcagggcgacttcattcttgacaacccaaaattgttggcttatcatgattttatagtgtggaaacatgcaaagcaattgttcacactcaaacaaaaggaggccgtggctttgcagattaaggacaacgtctatttactcgataatgttttatacagccatgtttatttgattacaggcgatacaccagttttaatcgataccggcatgcccggttttgcaggcgcgattatgaaggaaataagcgtcctgttaggcggtaccggcacgcttgcccatattcttttgacccaccacgatgtggaccatgttgggaacgcgcttctccttgctgaaaaaacaggagcgcaggtatggatatcaaaagaggacgagccctattttaccggcaggcggaaccggcccggaatcaagcatttatttgaaactttcctgagcgtgcccgcgccccgctgctgcgtttatccgccggacgggataattgacgggataaaggcaatccccgcgcccggccatacgcccggccacacattgctgcaatacggtgacgtgctgtttacaggcgacctgttccgcatgcggggaacgcttccccagctgatgccgaaacgcctgacctgggatgaaaagctgcaggcgcgttctatttgcgagctgcaaaaatccgctgccgtgtggctttgccccgcgcatggaaaacccgttaaaaatggacctgaaatgaaagcgttccttcacgctgtgaaagaaggggctcccagttgaatgaagcgcaaaagcgcgaggcaaagtttatccagatgacgcgcgcacccgtcaaacgcctcgtctgccgtatggcggtgcctaccataataagtatgctgattacctcgttttacaatatggccgacaccttttttgtcggccgcatcaatacgagcgccacagccgcggtcggcgttatcttctccctgatggcaatcatacaggccgtcggttttttcctgggcaacggttcgggaaactatatttcccgcaagctcggcgagcaggacacggaggaagcgtcccgtatggcggcgaccggcttttttaccgcgattcttgtgggtattgcttttatggcgctcggcttttgtttccttacgccgcttgcaaggctgctcggcgcgaccgaaaccatcctcccttacgcggaggattacatgttttatattttaatcggtacgccgtatatgacggcatcgcttgtgcttaataaccagctgcgcctgcagggcaacgccttctacgcgatgattggcctgacaagcggcgcagtcatcaatattgcgcttgacccgctttttattttcgttttccatatgggaatcagcggcgcggcgcttgcaacgattatcagccaatttatcagcttttgtattctgcttttgggctgcaaccgcaaaggcggcctgccggtacgcataaccatgttttcccccagcctcaagcgctacggcgccattgttggcggcggcctgcccagcctttgccgccaggggcttgccagtgttgcgacggtcagtatgaatatcgccgccggaccgtacggggacgccgcgattgcggctatctccattgtcatgcgcgtgtctaatttcgcaggctccgccctgataggctttgggcagggctttcagccggtatgcgggttcaactacggggcaaagcgcttcgaccgtgtacgccgggccttctggttctgcatccgcgtatcttccgtcgtactggttgcgatggcgttcgcggggtatatctggtcgccgcaaatcgtcgcgctgttccgggacgatgcgaaggtacttgaaatcggcgcgcaggctctgcgcttccaatgcctgtccttccccttgcttggctggattattatatgcaacatgcttttgcagaatattgcgaaaaccatgcgggcaagcatcctttcgatggcaaggcaggggctgttttttctgccgctgattttcaccctgcccaccttttgggggcttaccggcgtgcttgcctgccagccgcttgcggatgcttttgctttcctgcttgccatcccgctcggcttaagcgtactgcgcgaactgaaaaacggcgaacgggcgtacaattccctattatcttaaataagcggagcccccttcccgaattcaggaagggggctcttttatgctgttttcatccctcgcgcaagagcacgattggttcgattcggtttgacttcaccgccgcctgcaggcaggcaagcaggatgattgccgcaaaaacagccaggatgataagcgcgtccgccaaattaaacgtgagtgccattgccataatggtattgccgaataaggtattgagatacgggttaaccgcaaggtatgccgcaagctgccaaagccctgcgcccaggacggtgcagacaatcccgtttgtcagatattcgattgcaaacacctggaagatatgacgcgtcttataccccagcgcccggtagagggcgatttcttttttccggctcttcaggcagcttgagataaatatacacgcgccagccaaaatcatgacgacaaaaacaccaaacataccggacagcatcaggatagccgtctggtatggctccacgtcgaaattcaggctttcttccttatttacgggataaccgtcagccctcagggcttccatcaggctgtcaagatttttgtaattgtcggcaattactacatacctctcctgcattttatccgttatgagctcgcactgctgtgcaaagcggtgaagctccctttgcggtatgataaactgcgttccgctgaaaagcgggtctgctgtgttgtaggcgcccaccaccttgagcttgtgcgtgtggccggacatatcctgcatcagcagttctttgccaataagctttgtcccgtcgatttgagccgtctgcttttttgcctcgttgtagtcgctgaactgctccggaacaagaaccgcccccttttccgactcgtcaagagcgcggcccgccgttataatcggctcatagcccggatggaacgcgtcgagctggtaataaccgaacagctcgcccgacgtatcgcaggcctcaacctgcggcggctggaaaaaaacagtcttaacatgctccagtgacttaatgcgcgcggtatcctgtggaatctcttccagttcctccagatagacgacgcattccctgttaaggatatggtcgttgattttatgctcgacgttataccacagcgggcgcataaacgacacgacagccgtaagcagcagcacgctgatggcaataaacagcccaaacaacacggttttggcttttccccgaacaacggaggcttttgcaatcccgataaaacgggtgattctgttcatagcttcaccgcctcgcttggtggtatttttactagcctgcgcagtgtaaaaagctgacacaaaagaggcacaaacaccgcgattacaagagccgccgccgcaagcgaggcggcgctagtccacgaaaccgttttaagcagcctgtcatagcttccgttttgggcgaaccagttatataacgcaaaaacaattgccgacagcacggccgcaatacaaaagcttttcaggccgattttcagctgttctaaatacatactgagaaacacctgccggtctttatagccgatggcctttaacaggccgatttcttttgtccgctcggtcattgcgttatgtaccgcaagaaatatgttgagcaccgcaagccccaggacagcaaatgtaaacgcccgccctgcgacgttgaccacactgacaaataatttaaacgtatcatatataatgtaattaggtgtacaatcttttacacctatttcatctaaaccttgaatgacctgctgcacatggcgagaatcgtctattacgatactatagtaatcatgcgccccatcttctctttggtccatcaccgcctgatatccaattggattttcttgtttgacgtgttccatacacaatttgtcaagcaaaactcctgtatcgtaggaaacaagtatatcacccggtgtaaaggcagtcttttttatatcataaactccaacaacctttaaagtgaattctgtcggtggtacatccacatcactgtattgttcaatcgggaaagcaaatttatctgattttaaatgtaaagttttaccgataaatgtcctgccatccagaaaatcgacgtcctcatttaaggtgtctacgtcaaagtcaggataaaaaacgcttggcaccatacaagtaaactcttcactttctgcaagagcttttcctgcaatcgccggctcgtgttgtgttttatattctgaaacaaccctggctcccggaatttttatattggggagcagcttgttctccagtgtttgttccccattaatagaaagcatgtcacaaagctgccaaccccagcgattatttttttctagggataaaacatgttttgttttcacaatttcctcttgttgttcttcactcaaaggctttccttcaagttcaatagggccaaatgaaattcttcgtgcgtaatctgtgtttaaataattatctatataatgattaagcatactagaaatccctaaaattagaattaaggatgtaagccctattgtcatcaacacaaatatccctgtgttccgcctgccgcgccgcgtatttgccgctgaaagccaaaaatatccgcccggcttcatctttcctgctcctccataacgccgtcgcgcatgttaaacaggcggtccgcgtactcaacgaccgcgtcgttatggcagaccacaagcacccccctgccgccctgagacaaaagtttcagctgctcaaaaatggattgctcgttcgcgctgtcgagattgcccgtcggctcgtcagccaaaataaagtccgggttgttcgccattgcgcgcgcaatcgccacacgctgctgctccccgccggaaagctcgccggggtaatggttcatgcgctcctttaggccgaccgtctcaatcagctccttcgcgcgcgcttccatctcttttttactatggaaatcccggttaatcagcataggcagcattacgttctcataagcgcgcaggtgtgggttcaggtggaacgcctggaacacaaagccgagtgttttcagccgcacgtccgccagctcgttttttttgaggctcgccgtatccctgccgttgattaccacatggccggaagagggcgtatcaagcagccccgcaatctgtaagaatgtacttttcccggaaccggactgccccatgaccaccacaaattccccctggtggatggtgcagctgacgtcctttaaggcggtcacgccgtttggataggtttttgtcgcgttttgtatttcaatgctcttcatagctgccccctgcgctcatcaatcaatatttaccgggcaggcctgctttgcaggcccgcccggtgcggctatgcatcagtaaatttgaaccgtcaggttagaattaaaaccgccgctggaatttttgtagtaatcgaaatatgtgcccttgtcatatgttccaacagaaccgctcgtattgttaatacgaacttgctgcgggtaggttatgtaagaataaagattataatctgctcttcctataggggacccgcccgtcgaattacctttatacattgtaatttttcctgttgagacattcttcccattatagacgcttagtaccgtgtggttgtgagaatggatacctttaacagaggttgtcaaagtaaacgaattggagccctgtgccgacgtgccgaagttattaaaggtaaacgactgcgccgcagccccaaccatacatatggaagccacaataacgagcgccaataaaacggtaatcatccttgtaattctttttttcattatattacacctccttttctataaaatatatgactgattgcaatcaaatcattctaccataattatattttaataaatagcaattgtcaattataatttaaatattattcttatttttttgtgattttattacacatatcttcaatttacatttttattactattttgtttgaaaataaattttaacccatttatattttttaaaatttaacgaacaaagaaaaaaccgctctgggataacccaggcggttttaattttattatttaattttttctctatcgctaagataaggccgatgacaggttgtccccctgcgccattttcctgtattttatttttccgcggcaagctgctcctgctgcattgtatcaacgggagcgggcgccggtgctttcgcgtcctcccgcttctccttttcttgctgctgtttgtcgtattccttaatccaacggttaagcttcttcatttcaaagataacaaacagtatgacaattaccgcagagctgatgtccgcaatcgggccggcgtataggattccgtccaagccgaaaaacaatggaagaatcaaaatcagcgggacgagcagcagcagctggcgaagcgaggataaaattgctgccttgagcggctggcctgtcgcctggaagtagttggtcgaaacaatttggattcccgcaaaaatgatgccgaacaggtaaatgcgcatacatttttcaccgaatatcataaattgccccttccctccgccgaacacctgcaaaatcaaatccggtattgtctggcaggcaatccagccaagcgcaatcaaagctgttgcagaaataacagcaagcatataggtcctacggatgcggtgcggcctgcgcgcacccaggttaaacccgaatatcggctgcgcaccgattccaatccctatgccgaacgcgcccagaatcattgcaattttcataacgattcccattgcgctgagcgcgacgtcgccgccgacgtcgctttggtccccgtaataaacaagcgaattgttcataacgacctgcatgacgcatgcaacaagctgcgtaatgcacgcggaaatcccaagcgtcgaaatctttttacaggtaaagccgtccggcttcatcagtttaaagtccaagcgcatatggccgcgtttgataaaatacagcagcagcacgacagttgaaataacctgcgacgtaacagtcgcaacggccgcgccggtaacgccccaatggaacacaaaaatatagatagggtcaaggattgtatttaatacggcgccaatgagaaccccatacatcgacattctcgggctgccgtccgttcgcgccatattggaaagcgatacgcttaaaatactgaacggtatccccagcaggattacgaaggtataatcctttgcgtatggcataacgctcgggattgcgccaaacagccttaaaaccggttcaaggaagataaggccgacagccataacaaccacgcccaatattacggaaagggtcacaacgttgttgagcgtccgcttcgcctgtccctcttccttttccccaagcttgattgccgcgaacgcgccgccgcccgaaccaatcattgtggcaaaagccaggactatcgtcataattgggaacgcaacagtcgtagcggcgtttcccaagtagcctacgccccagccaataaaaatctggtctactatgttataaattgagttaatcaggcaggatataatcgccggtaccgaaaaggacagcaaaagcttgccaaccggcttatattccagcggattttgtgccagtgtctgtgcttgattcaagttcatccatctccatttgattcacatatcggtatgaaatttccgccatttgcccgagcagggcaacgctgcgctcaagctcctccggcggtattcccttcgtcagggtttccacccaatttttccgcgccctgcggatttcctcaacgacgggcgccgcacgctgtgtcgtgtaaagcctgcgtatcctgcggtccttttcatccgtttccaccctgatatagccgcattcgctgagctttgctatggccttagccgtcgttcccttatcaaaatatccggttcgcgcaaggtccagcacgctgattccctcattttcgttcacacgcagcaaaaaaaagtattgtccgcacccgattttggatgcactcagctttttgttgtaataacggtttgcctgccggttgattattgatataaacttcatcagctggtaattttcgtacatggcgcagcccccattttcataagcgacaatgattgggtatccaactaatattttagcaccaaaaggttggcagcgcaactaatcggttctaatttttcctattttaccaaaatcacaaatttatccctcttattttctgactgtatttacgagcggttatttgaacatctttatttacagcataaaaaaacagcgcggagaaaaattctccgcgcgcgtaggaaaaaatttgttacgcaatgcgtttttcacgccatttgcccgatttccatcgccaaagcatcaaaacgccgcgcaggcattcatccgctgcgaaggcaatccaaaggccgttcagccccagcccgaaaacaacggcgagcaaataggaaccaagcgtactgacaatccacatggagaaaatcgcaacacccgtcgggaagtacacgtcgcccgcgccccttaagctgctgatgacgacgagattgctcgttcgtccaagctctacaaagatattgatgataatcagcaccacacccgcggcgataaccgccttgtcggcggtaaacaggcctatcagctggtaacgcagcaggataccgaggacggatattgacatggtaatgataagcgccgtccggaaggcacgcagacattgccggtacgcgccgtcgaagtccttagcccccaccttatgcccgacaaggatttgagcggcctggccgatagaaaccgaaaaaatatagaaaaacattgtgatattggaaacataagtctttgttaccagttctgtctgtgtcagaaaattaagtacaatcgatgtaaccacaagctgggaaacattgtagttgaacgactcaaacgcggatggaagccctattctgagcagggatataatgtcctttttgggaaacggccggagcattttgaagatagagggcttttcaatctttttaaacaggaaaacgaaaagtacaataatgccgacaatccggctgaaacttgtcgcaatcgcaacgcccttgataccgagctgcggaaagccgagcagaccgagtacaaaaacaatatcaaaaaaggtattaataatattcatagcgaccgtcacatacattgttaccttggtatagccgtgattgcggatgatgacggataccgctcccaaaagcgcctgcgtaaaaataaacgctcctacaatgatgagatattcatttgcaaagctgaggatttcccctttagcgcccataaaaacgagaaacggcttacaaaaaatgacgaggataccgctcatgacaattccaagcagcaaattaaaaagtatggaaagcgcggcgacgcgtgaagacttttctttatcgcccgcgccaagcgcctgagaaatcaaaacagcgcttgcaccagatatgaccgtaaacaccagtgtacagatagataccacctggttggcagcctgcgccgccgacgcggcaaggtcgctgtaccggctgagtacataaacgtcaacaaatccgagcagcataaataacgccgtctcaataaaaatcggccacgacaaattaaaaagcgtcatctttttcatccgtttcccctccttatacatgtgaattgcactcattttaatttcacagaagcaaaaagtcaacagaaactgaaaaaaaataaaaatttttttttaaaatgtgtcatttgttgttgtatttattaaatacatacgctatactaataatgaatatataaacccgttagttgatggtaaaacctacgtgcgtttatgtatgcgaataattgtaaaggaggtttggcaatgggtatatccgaaaacttaaagaagggtacgtcggagatgttaatcctcttccttctggagagagaagacatgtacggctaccagcttgctcaggagctcagagagcgcagcgaaggttatttcgttatgcctgaaggttccctgtacccgactctgtatcgcctgattgaaaaaggcgttattacagacaggcaggaaatcgtcggcaagaggcttcgcaagtattatcatctcgagcccgcaggcaaagagtatttgaagtccattgttgctgagtaccgttccattaatcttggaatccagaaggtactgggcgaggatttgctgaaaggcatttccggctgagccgcagcgtaacggcatctatttcggcacatataaaacggcctgtccggttttccgggcaggccgttttatatttttattccaagcatacaaaccgcccccaactgagctggaggcggtttctgccagctaccccctggccactgtttcttttatcgtgcccttcaggtcttttgcattaaaatcaagcatttcctgtatttgcaaagagatgtccttactggtaaaagacgcattggtcacggtgaatgttgcctgtacaagaacctcttgctttgaaaaatcgaacccatcaagattagtgatattaaacataatttcatttttttcatatgcattataaatgggcttcccgatataagggaacgacagcgacccgtcgttaaacctgaccttaccaccgtcgtagcggatagaggcgttcaggccgcagagaggggcgtttaccccgctgaggtacgcggtataggtgattttgtcaccgaccttataaaccgaaaccttcgggtcataaaccgtaacttcacacgtcgccttcgcgccgcttccgtccttcgcggtacacgtgattgtcgtactccctacgccaaccgccttgagcttgccgtttgcgtccaccgtagcaaccttcgggttgctcgacttccacgtcaacgccttgttcttcgcgttcgatggcgttaccgtcgccttgaaggaaccgcttttgcccaccggccagctgattttattcgtgttgagcttgacgctcgtcaccggctggtaaaccgtaacggcgcacgtcgccttcgcgccgcttccgtcctttgcggtacacgtgattgtcgtactccccacgccgaccgccttgagcttgccgttcgcgtccaccgtcgctaccttcgggttgctcgacttccatgttaacgccttgttcttcgcgtttgtgggcgttaccgtcgccttgaaggaaccgcttttgcccaccggccagctgattttattcgtgttgagcttgacgctcgtcaccggctggtaaaccgtaacggcgcacgtcgccttcgcgccgtttccatccttcgcggtacacgtgattgtcgtactccctacgccgaccgccttgagcttgccgtttgcgtccaccgtagcaaccttcgggttgctcgacttccacgtcaacgccttgttcttcgcatttgtgggcgtcaccgtcgccttgaaggaaccgcttttgcccaccggccagctgattttattcgtgttgagcttgacgctcgtaaccggctggtaaaccgtaacggcgcacgtcgccttcgcgccgtttccatccttcgcggtacacgtgattgtcgtactccccacgccgaccgctttgagcttgccgttcgcgtccaccgtagcaaccttcgggttgctcgacttccacgtcaacgccttgttcttcgcgtttgtgggcgtcaccgtcggcttgaaggaaccgcttttgcccaccggccagctgattttattcgtgttgagcttgacgcccgtaaccggctggtaaaccgtaacttcacacgtcgccttcgcgccgcttccatccttcgcggtacacgtgattgtcgtactccccacgccgaccgccttgagcttgccgtttgcgtccaccgtcgcaaccttcgggttgctcgacttccacgtcaacgccttgttcttcgcatttgtgggcgttaccgtcgccttgaaggaaccgcttttgcccaccggccagctgattttattcgtgttgagcttgacgcccgtaaccggctggtaaaccgtaacggcgcacgtcgccttcgcgccgcttccgtccttcgcggtacacgtgattgtcgtactccctacgccgaccgccttgagcttgccgtttgcgtccaccgtagctaccttcgggctgctcgacttccatgttaacgccttgttcttcgcgttcgatggcgtcaccgtcggcttaaaggaaccgcttttgcccaccggccagctgattttattcgtgttgagcttgacgcttttgactgtaaacgcacatttaatattgtttttagtgccatacttatgtgcatatgaatccgattcggtataaatcgtaacatccgggatcccgtctaatattttttcacctatttttgtaacggtagccggaatagctacctgctgtaaactgattgcgtaagcaaatgcatagtccccaattgccttgcaattttttttgttctggatattgatttcttttaaattattattccacataaaagcataaggcgcaatcatttccaccccggaaggcacctgaaaggttgtcttttcatatccagccggaaattcaactaatattttttcatcattgctgtaaagtacacccccctgggtcgtgaggatacggttcccggctccaactgaaaaagactttaggttcagacagccggcaaatgctccatatccgtatgattccacccttgaaggaatcaatatataatttagacttgtacatccataaaaggcaaacggcgacaatatatacaaatagtccggtaaatatacattcaccagattttcgcagaggctaaacgcgtctatgccgatatattcgacataatccggaattctaacttcgtgcattgtctgattttgtgcaaaagccccgtcggcaatcatctgcacgtaaagcccttttatttggtcgggtatatagacaaaagtgtcgctgccggtatagccagaaattgcaatatactggtaaccgtcgtccgtcttcatgacatcatacttaaaatcgccgtacatcgcgcttgcaaccgcttcatcgtctgcggccgcgcgcgtcacctgcgagtcgtcagtggctgcgcttacagttgccggcatagccgcaagcatgccgagcaccaacaggaatgccagaaggaccgacaccccttttttgattgttttcataaaaaaacctccatccacaatgtaattattccgacaattccatgatatagaaaaaagcaatgcctgtcaataaaaggtgaagaactgttacttttattgcccagcatctctgtttttccgctccaacgtttttaagcttagaacgccatcaggcaataaacagataagaaaagagaggaaaatttgaaatccgggaaaaaatatgctatgctaattaaaaataaagggaaacaactacaacaaaagcagtaaaaaggaggcgggcggatgaagatacatgaatctgcggaaaattatctggaaactattttgattttaagccacaggaatcccgccgttcgttcgattgatatcgtcaacgaattggaatttacaaaaccgagtgtcagcgtcgctatgaaaaacctgcgtaccaacgggtatatcgaagtagacagggatggctttattacacttacggaaatgggacgcgaaatcgcggaaaccatgtatgagcgccataccttcctttccgactggctgattcggctgggggtagacccaaagacagccgttgaggacgcctgccgtatcgagcatgtcatcagcgcggaaagctttgaggcaatcaaaaaaacgcaggcgggaaaaccttaaaataaaaggagcggggaaatcaaccgtttaccgaaaaatagacaaaaatgggactctatcgtagaatagtaaagaattatgtaagctggctccgtttaagaaacggggtcagcttgcttttaagctgaaacttttcgaaattgtaggaatagatatagtcatcaattagactgcgggctttctgtaacgccaggattttcaggcggtaaatgcagctggaaaacgcacggcttccaatttccacgccgccatcaggttcacgatttttataaccgtttcggggatgggaataaaaaccggaaaaggtgtagtctccctatacttgtcacgcgttttcccccaatttgtgcgggtacgttttcttcagcttttattcctcggtattccgtgattttcgccgtaccgccggcttttatttcgtacatatagtccccgttctgttcagctgaaacggcagccgggataataaatagtgcgccaaccgtcagcggcgccgcaaggcatatggataacacgttccccgttatattcattacaatccctccgctgctgttttctttgaatttattttaaagtaaaatcaacaaaaggacgttactgcggagccatcgcctcgcgcgggctgatttttgtaaggctccttaccattacaagttcgcacaaaagcggtactattgtcgtaagcagcagcgcggctaaggaaagcagtgcaaaatcgagccagcttaccacgtaaatccggccggcaaacgggccgttcgcgtttaccaaattcattacggctacgcacgcagccgaaagtattccgccaaccgcaaacgctcgcaggccggtttttaattgttccatgtataagctcaggaaaatctgccggtttttgtagccgattgccttgagcagcccgatttccccctttcgctccagcaagccgctggaggtcgcaaggaacaggttgatgaccgtcaggagcagtaccgctatggtaaaaaagttccctgccgcggtgaatacggttgcgaacaggccaacgtcttccggtacacttacttgtgtgtaagatgaaacatcaattttcattccttccaacgctttgcgcacatcatcaacgttttctgcattatctactaaaacagtaaagctgtgcaggtctgtacgtttaagcgcttcataatattcttacatataaatatcgctatttgtcgcattaaccgccatttgctcaatttgcctgccagtttcattcgagacaaaaatggtattagggtttcctccccttccatcataggaagcataatagactccaactacattaagcttgtattctatagcaggaagaaaatcccactgggtcaagtaaacgccgccactttctttatattctattgattcataagaaccagtagcgggaactatagttaatgtttttcccaaataatcttctccattttgcatatactcttctttttcattgctctgaacatcataattgtttaccaagcagaatgagtttggaaccaaacaggaaaataccgggctatcatcgagctgtttgcctgcgataattttcattttttgtgttttatatagcgaccacgcctctacagacgtctctgaaggtgaaacgggtagaatgtcagtacaattatcacctttttcatttgacactgcgttaattttaaaaaactggtattccataccatcgttcatatcgaccgattgaacatgctctatctgtccaacctttttaatcagttccggagttaatacttgcattcccaaatcggtaaatccagtttcgattactagccgtcttgccgggtcttgatttttaaacccatccatagcgtattgtaacgtaaccgtataactcgtaatcagcattagtgaaagaacggaaaggagcaaaagaataaagacagaaccgcctcttttgtttcgtctgctattggcttttgccagttgggtatatctccatagcttcatgcttttctcctttccgccgggcgcaggaaacccgcgcccgacataccgtatttctgattaatatgtttgatttgttgttaaagaagacttgaaaccgccgtaagtattatcataatagtgcacgcttgatccatcaggtacactaccaaaataatatgtcggacgtgaagcctgatttccatagaggcagtagtcctgttttccgtatgtcttaccactcttcttgacataacagtttccttttgtataagccttgttattataaatagtgggataagaagcaaagcaatcagaacgtgttcccttatagtttgcattaaatacaaacgatgtactgcctgtcgcggcgcagctaatagtatgattccagctttgtactgctgccgtcgccgttgacatacagcctgcagccaccatcatagctgtcaggacaactgtcgcggttctttttgtaaagcaccttctcttcttcattttattggttttcatcatctaagttccctccttaaaaggtttgttttttactcctgcattttggggtaaaagcttattctgtccattggaatcccctcctatctgtattaaataattgcctccattccattcaaagcgtttctatatgttataatagaaaatttttacgtttcatctgtatgaaacatggcttgccctactgcggagccatcgcctcgcgcgggctgatttttgtaaggctccttaccattacaagctcacacaaaagcgggactattgtcgtaagcagcagcgcggctaaggaaagcagtgcaaaatcgagccagcttaccacgtaaattcggccggcaaacgggccgttcgcgtttattaaattcattacggctacgcacgcagccgaaagtattccgccaaccgcaaacgctcgcaggccggtttttaattgttccatgtataagctcaggaaaatctgccggtttttgtagccgattgccttgagcagcccgatttccccctttcgctccagcaaaccgctggaggtcgcaaggaacaggttgatgaccgtcaggagcaataccgctatggtaaaaaagttccctgccgcggtgaatacggttgcgaacaattctatttcggatggaataaaccgctccggaaaggctgatatagagattcccatatctttaatctcctgccggacggcgttaaaattctcataggagtccgccaacacggtatagccgtgcatggcggggtttgttttgtccctttgatactgttctataaagttcgaatcctttgttgccttgaccgccatttcctctattttttgtcccgtttcgttggaaacataaatctcttttggtgatcccctaccagcataagaggtataatatactcccacaacctttagtttataatctatcgccggcaaattttgtgcgtctgtcatgtagcctccatcttcatcttccttataactccaaaacgcatagtaatctcctaacgcctttaccgtaaaggttttcccaatataatccgccccgttttgcaacgaaaagatgttttcatcaatcgtatagtcgctgaccgggcagaaggtactcggcaccaggcaggaaaacaccgggctttcatctaaccgcttgcccgctacgacctccatctcctgcgttttatataaagaccatgcctccacggaatacccgtattcatttgtgggcggcatcattttgctgcagtctttcccgtattcgtctgtgagagcagtaatattaaaaatttgccgcaccatcccgtcgttgatatccaccgactgcacgtggtcaagcttcctgatatcatcgagaacctcctccgtgagtatgaccccctttccaggctctggaaaaaaagaattaatttcaattcttctggcggggtctacgtttgtaaaaccgtccatcacgcggtggagcatggaggtaacgcttgtgattaatacaagggctatcacggaaaagagcagcagcaaaaagagggcggtgccccgctttccctttttcctgttcgcgtttgccaaaaaggtatagttttgcagtttcatacgcgtcctccttaacccttggctgtggggcgcccgcccgtggaaaaatcccacgggcaggccgctttacgcagcttagaaaattagtaatactggtaggtatcgaccgtggacttaaagccgccatagttgtttatgtaataatgctgactttgacctttattaacttgcttaaagtctatagtcgggtgtgatggaataccgccgaccagcttatacatctgataacctctttttactccgctctgcaacacatagcagttcccctgcgtatagctcttcccgttgtagattgttatgtaagagccaaacgtgtccttgcgggtaccattatgcgccgcagtcacgacgatggtttccgtacccgtcgcggcagcctctgccgtccaggtccagtgttccgccgcggcgttcgcggaaaacacacagcccgcggcaaccattaccgcggttaaggtgaatactgccgtgctttttgcaaaaggccttcttttctttattttattggttttcatcatctaagttccctccttaaaaggtttgttttttactcccgcattttggggtaaaagcttactctactctgtccattggaatctcctcccatctgtattaaataattgccccgattcaaattacaagcgttataattgtttcgataaaaaaatttatctataattttatatgtattatctgtaacaaacatatcataattttatttatatatcaataatttgttatgtttggtattatttttgtgatgtttggtataaatgtaagacataaatatattgtttcaatttgttatatttaaaaaagagcataaaaaacggacagcccgtaaaaacgaactgtccgttaaatgcttatggtattgtcagcggagcttatttcgcggctttaagcgcagcctgtgcagcggcaaggcgtgcaatcggcacacggaacggagagcaggaaacatagttgagacccgcgttgtggcagaactcaacagatgacgggtcgccgccgtgctcgccgcagatgcccagcttgatgtcggggcgtgtcttgcgtccaaggtcggcagccatcttgacgagcttgccaacgcctgtctggtcgagctttgcaaacggatcggactcgtaaatctttgtctcgtagtacgaatcgaggaacttgcccgcgtcgtcacggctgaagccgaacgtcatctgggtcaggtcgttcgtaccgaagctgaagaactccgcttcctttgcgatttcgtccgctgtcaaagcagcgcgcggaatctcaatcatggtaccaacatggtatttcatatcgacacccgcgtccgcgatgagcttgtcggccgtcgttgtgacaacgtccttcacatacttgagctcttttacctcaccaacgagcggaatcatgatttcaggaacgatgttgtattccggatgctccttgttgacaacgattgccgcgttgatgacggctgtcgtctgcatctcggcaatttccgggtaggtaaccgcaagacggcagccgcggtggcccatcatcgggttgaactcgtgcagtccgctgattacgttcttgaggtgctccacggtaatattcatttcttttgcgagctcttcaatgtcctcttccttggtcgggacgaactcgtgcagcggcgggtcgaggaaacgaaccgtcatcggacggccctcgagcaccctgtacatctcttcaaagtcgccctgctggtacggcataatcttagcaagggcagccttcctgccttctaccgtatcggaaacaatcatctcgcgtatggccttaatcctgtcgccctcgaagaacatgtgctccgtacggcaaaggccaatgccctctgcgccgaacttgacagcctgggccgtatcgcgcgggttgtcggcgtttgtcctgaccttcagggttctcgcctcatcagcccatttcataaagacgtcgaagtcgccgataatggcggcgtcaaccgtcgggattgcttcgccgtagatgtcgccggtcgtaccgtcgagggaaatgtagtcgccctctttgatggtctttccgccgagctcaaactgctttgcttcttcgtcaatcttgatttcgccgcagccggatacgcagcaggtacccatgccgcgcgcaacgacagccgcgtgggaggtcataccgcctctgacggtgaggataccctccgcagcgttcataccctcgatgtcctcaggagaggtctcaaggcgtaccaggacgaccttctcgcccttttcgacccattccttcgcgtcttcagccgtaaatacgaccttgccgcaggcagcgcccggggaagccgcaaggcccttgccaatcggcgtggcggccttcaaagccttcgtgtcgaactgcgggtggagcagcgcgtcaagctgcttgggctctactctcaaaactgcctctttctctgtaatcatgccttccttaacaaggtcgacagcgattttcagagccgcggcagccgttctcttgccgtttcttgtctggagcatatagagcttgccgttttcaatggtgaactccatgtcctgcatatccctgtagtggttctcaaggcggtttgcaatctcgacaaactgcttgtaaacctcaggcatatcctcagcgagcttggaaatcgggctcggcgtacggacgcccgcgacgacgtcctcgccctgcgcgtttatcaggtactcgccgaacagcgctttctcgcctgtggcggggtcacgcgtaaaggcaacgcccgtgccggaattctcgtttaagttgccgaataccatcggctgtacgttgaccgccgtgccccaggaatacgggatgtcgttcatgcggcggtacacgtttgcgcgggggttgtcccagctgcggaaaacagccttgacggattccatcatctggaccttcgggtcggtcgggaaatcctcgcccttttccttcttgtagtaatccttgaacaggacgaccagctgcttcatatctgccgcgtcgagatcgatatcgttcttgacgcccttcttttccttcagctcatcaatgatgacctcaaaacgcttcttggagatttccatgacaacgtcggagaacatctggataaagcggcggtaggagtcgtatacgaaacgctcgaacttcgggtcggggttacccgcaatcaggcccgctacaacgtcgtcgttgaggccgaggttcaagatggtgtccatcataccgggcatggaagcgcgcgcgcccgaacggacggaaacgagaagcgggttcttcgggtcgccgaattttttaccgttgatttcttcgacgttagcaagcgccgcgtaaatctgctcttcaatatcggcgccaatctttttgccgtcttcataatagcgtgtgcaggcctccgtggaaacggtaaagccctggggaacaggcatgccaagcctgaccatctctgcaaggttcgcaccttttccgccgaggagctctctcatgttttcgttgccctcagagaaaagataaacatacttgtggctcattggaaactacctcctaaaattcttcgcgtacaaacaaaacgaaagcttgtacacatccttgtttactgactatgtcagtccaccctgtattatagcaaacatttcctgaattgaccagacttttttccgataaaaacgaactaatttagagaatcaaacgattgacaatactgttgaaaacgttaaatttcggcggcagcatgaattacatcttgaaaattacacaatgtgtgagataatatggatacctgtaaaaacagtataatgtatttttgcgcccttttggcggcgcgcagggtacataaagaaaatggggtgctttctatggcgcagcgcagcgctgtgattctcgcgggcggcgaaggcaagcgtatgaattcggataaaccgaaaaccctttccatcgtgctcggcaaaccgatgctccggtggataatcgactccctcagtgaaagcggcatcaaggacatttgtgtcgtcaccggctaccggaaggaatgtattgaagattacctgaaaacacagccggagccaatccaaacggtattccaaagcgaacggctgggcactgggcacgccgtaatgatggcggaggaatttttaaagcggcacggcggcgacgtcgtgattttaaacggggacgcgccgtttatggacgcgcagacgattaccggcgcctttatccagcatgacgaaacaaacagcagcgcaaccgttatttccgcaagggtggacgaccccacgggctacggcaggattgtgcgcgacaaggaaacaggcgcgctcaaagcaattacagagcaaaaggacgccgacagcgaaacgcttaaaataaacgaggtcaattccggcggctattggttcgataccgccgcccttttgagcgtgttacataagattaccgcaaacaacaacgcggcggaatattacctgcccgacgcgttaaagctgttattggagcagggccttccggccggcgcgtatacggcggcttcgagcgatacggtgctcggcgcaaacgacccgcagcagcttgcggaattaaatgaaatcgccaggaaaaagttcggctgaacaaaaattcttttcagctttttaatcgtcagatatttattttatataaaaaccggacgaagataattttgcgaaagcggaattttccacagcccggatgtagggggatattattcaaaatgaattttcacggtaaggacatcaaaatcttcacaggaagctcgaacaaggatgtagcgcagggtattgcaggatgcctgggccttccgctgggcaagtctgactgcagcacgttttcagacggggaaatctccgtttcgctgcatgaatccgtaagaggctcggaatgctttatcgtccaatccacatgcgacccggtcaacaacaacatcatggagcttctcatcatgattgacgcgatgaagcgcgcatccgccgcccgtattaccgccgttatgccgtactttggctacgcaaggcaggaccgcaaggctaaggcgagagacccgatttccgcaaagcttgtcgcggaccttattacgacggcaggcgcggacagggttttgacgatggacctgcacgcggcgcagattcagggctttttcaacattcccgttgaccatctgctcggcgccccgatgctcgcggcgcatatgcgggagaggatcagcggcaataccgacgagttcgtcgtcgtatcccccgacctgggctccgttacaagggcaaggaactttgcaacgaaaatcggctgcccgattgcgattatcgacaaacgccgccagagggcgaacgtttccgaggtcatgaatatcatcggcgaggtagaaggtaaaaaggtcatcctcgttgacgatatgatagacaccgcgggcacgctgtgcaacgccgctgaagccattatcgaaaagggcggcgccaccggcgtatatgcctgcgcgacgcacgccgttttgtccggccccgcgattgagcgcattgaaaagagccccatcaaggagcttatcctgctcgacacggttccaatcccggaggacaaaatgctcgacaagttcactatccttcccgtcgctcccgtatttgcggaggccatcgagaggatttacgcggacaagcccgtctcccccatgttcaaataaacagggctgccccgcatcataaaataaaacaggttacagtaaggcggcatccaaaaatgccgccttttagccgtatctgcataaccggaaaagcttccggtatttccgtcaaagcaggagaggggaccccatatgtttaaaaatatgtttcacaaaagcaatgccgccgcgccgcagggcccggtggaatttatcgtcgcgggcttgggcaacccggggcgggaatatgaaaacacgcggcacaacgcggggtttgttacaatcgaccggttcgcggaaaaacataacgtccagataaaccgcctgaaatacaaggcgctgtgcggagaatgcacggccggcggaaagcgcgtcctgctcatgaagccccagacgttcatgaacaacagcgggcaatctgtaacccaggcgatgtctttctacaaaattccgcccgagcgggtgattatactactcgatgacatctcgcttgaaccgggaaggctgcgcatccgcaggaagggaagcgacggcggccagaacggcctgaaaaatatcatttacctttcaggcaaagacaccttcccccgcgtgaagattggtatcggcgcaaagccgaaccccggctgggaccttgcaaaatgggtgctgtcacgctttacgccggatgagcagaagctcctgctggaagccgcagacaaggcttgcgttgccctggagcttatcatcggcggagatatcgaccgggcgatgaacctttacaattcataacgaagcaaacgtgcctgtaaccattacggctttatagaggaaaccaatgaaatttttatcaaacgtcatcaaacagctgcccgagtacaaacgcctttccgaatgccttgatttttcccccgccgccgcggccgcagcggggctcaccaccgtacataaggcgcatatcatccacgcgctctgcgccgaaaaaggcgtcagggcttttgtcgtcgcgtccgacgaggcggaggcgcagacgctcgcaaacgatttaagttccatgggcgggaaagcgctcgtctatcccgtgcgcgactttaccttccgcgacgtaaacagccagtcgcgcgaatatgagcataagcgtttgaacgtcctgtcgaaaatgctgcggggcgattataccgcggtcatcgcgtgtatcgacgccgcaatccagtacaccatcccgccctcggcccttcgggacgctaccgtacgattccagtccggcgggcggctgccgctcgagcaggcggtgcgggtccttaccttaaacggctatgagcgctgtgagcaggtggaaggcccggggcagtttgccgtgcgcggcggcatccttgatttctttatgcccgacgcccaggctcccgtgcgcgccgaattttggggcgatgaaatcgatacgctcaactacttcgacgtggaaacgcagcggcgcaccgattacatcgaagagcttaccctcaccccctcgacggagctattaattggcgacgcggaaaagcttgccgctaaaatagaacacaaggcctcgctgctgcgcggaaagaccgccgcgcaggcgcgcactgtcctccagcgggaatcggattccttgcgaaacggcgtccgccccggctcaatggataaattcatcggcctgctttacgacagccccggaagcctgtttgattataaggataaaaaagacctgctgtttctattggagccggtcaaaacgaacgaacgcctgcgcgcgtacaacaggctgtttgaggaggagctgcaagactgcttttcagacggcacgctttgccgcgggttcgacaaataccagcttgaccgtgtagagctgcttgatattctgcgcacgacacgcaccgtatacctcgataactttacgcacggcagctacgagctgccgcttagagagcttgtcacctttaccgcaaagcagctttcctcatggagcggctccatgaaggttctctgcgaggatttgcaggcggattttcataaaaacagccgcatcgccgtgcttgccggtacgcagcgcagcgcacagagcgtcgccggggagctgaaaaagcagggcttccccgcagagcttgccgaagaccccgcagagcttgcgccggggaaaatctatgtgcttgagggatgcctttcctctggctttgaatatccggcgctccatttttctgtcattacgcacgggcaggttgccgccgcccagaagcggaaaaaggcaaaaaataaaaacgcccagcagatatacagcctgtctgagctgtcgcccggcgattatgtggtacacaccacgcacggcatcggcgtgttcggcggcatccagaagctcgacatgcagggcgtcgtcaaggactatatccgggtagagtatgccaaaaaagacgttttgtacgtccctgtcacgcagctcgaccttgtatccaaatatatcggcccaagggaaaactccaccgtaaggctgagcaggctcggcggcaccgactggcagaaggccaaggcgcgcgtaaagagcgccgtcaaagacatggcaaaggagcttacggtcctgtacgcgcagcgcatgcaggcgcaggggcacgcgttcccgccggacggcgactggcagagggattttgaagcgcgctttgaatatgaggaaacagaagaccagatgcgctgtattgaagaaatcaaggccgacatggaacgaaccgcgccgatggaccgcctattgtgcggggacgtaggctttggaaagaccgaggttgcgctgcgcgcggcgttcaaatgtgtgaccgattcgatgcagtgcgcgcttttatgcccgacgacgatcctcgcatggcagcactaccagacggtactgcgcaggtttgagggctaccctgtgcgtgtggagcttttatcgcgtttccgcacgccgaagcagcagcaggatatcatccgccgtttaaaacgcggggaaatcgacatggtggtcgggacgcaccgcctggtgcagaaggacgtggtattccacgatttggggctgtgtatcatcgacgaggaacagcgtttcggcgtggcgcagaaggaacggtttaaggaaatcagcaaaaacgtcgacgtgctcaccctttccgcaacgccaatcccccgcacgctcaacatggcgatgagcggtatccgcgacatgtcggtgctcgaggaagcgccgcaggacaggcatcctgtacagacctatgtgctcgagcatgacgacggcgttatctgcgaggctatccggcgcgagctgcgccgcggcgggcaggtcttttacctgcacaacaaggtggaaacaatcgaacgcagggccgcaaagcttgcgtccctgattccagaggcaagaatcgccgtcgggcacggaaaaatgaatgaacaggagctttccgaggtctggcggaaaatgattgaacaagaggtaaacatccttgtctgcacgaccattatcgagacgggcgtcgatttaccgaacgccaacaccctgattatagaaaatgccgactgcatggggctttcccagctccaccagctgcgcggcagggtcgggcgctcctcacggcgcgcatacgcgtattttacctttgtgccgaacaaggtattaagtgaaatttcgcagaagcgcctgacggccatccgcgaattcacgcagttcggctccggctttaaaatcgcgatgcgcgacctggagctgcgcggggcgggcaatatactcggcgcgcagcagcacggccatatggaggacgtcggctacgacatgtacctgaagctcctcggcgaggccgtcaaggaagaaaaaggcgagccggtggaggaaatggatctcgaatgcctggtcgatgtccgtgttcaggcgcatattccggaggattacattgaaagcctgagccagcggctcgacatttaccgccgtatctccgacatacggagccaggaggacgcgcacgacgtcaccgacgagcttatcgaccgcttcggcgacccgccgaaatccgtgctggggctcatagacgtagcgcttgtgcgcaacgcggcggcacagatgggtatttatgaaatcaagcagcagaacgataccttcctgctttacgtccggcagattaagtcgcagggcgtcgcggacattatcggcaggctcaagggcagggccatgttaaacgccgggaataaaccctacattgccgtcaagatgggaaaggatacgcccgccctcgacgcactccaccggattttcaacctgtaacaatggaaattcggctggtttattcttctgcggaacttacatttgtaaatttgttaaattatttcttttgatatagacaaattttgcggaaacgtgtataataatttacgctttgtatcaaacgaaaggaatgagtattagaaaatgaaaacttcaaaaaagatacttgccctggctctggcaatgggcatgttcgccgcagtcgcaacaggctgtgccgacgagtcatggtcttataaggacgacctgaacacgctttccccgggaacctatatctactatatgtcgggcggctacagctatgccgcgtcccaggtgagcagcgcaaattcgtcttcaagctccacagagagcatcgacgtcctgacacagaaaatcaaggaccaggacgacaaggaaattaacgcccaggattatgtcctgcgtgaagccgaccttgcgtgcaaaaacctgctgaacacggacaggctgtttgcagaaagaaagctgaagctttcagaagaagaggaaaccgccgcgcagtcgaacgcagataccatgtggagctactacggcaaaacctatgagaaaatgggcatctcaaaggattccttctacaacgcggaatacctatttgccgctaagtacaacgccatcttcaagtccatttacggaatcggcggagaaaaggccgtaccggacgacgatatcaaggactactttatcaaaaactacaccgattatgcttatctgccgctgaacctttacaaatcggaggagagcagcgattcctccactggcacgacgtccgttgcattgagcgaggaagaaatcaagaaggcaaaggccgattttgacgattacgcaaagctcatcaacgacggaaagaatacttttgacgaaatcgatgatatattcgtaaaggaccaggggcttgagaagagcacggcggtcaagaataccgaggtgctggacgactcttctatcggcgacgagctgaaaaaggcgattaaagatttagacaacggtaaggcaaccgttatccaggtcggcaaggacaccaccgcggtgctttacctcgtctacaagggagatatcaataaagccgccgaaaatgttttcaacgacacccagcgcaccaatgtcctgagaaaaatgaagtttgaagaattccaggacgacatggaagcgcaggcaaaggactacaaatgcgaaaagaacgaggctgtcgtcaacaagtaccagccctccatgtttaaagagtatatgaaccagtaattcaagcagatttgttaaagcaggcggaaaccccgcctgctttttatttggcttctgtataaaggaataaaaacagttttttcagctttcaggaataaaacgctgcgattttatgctataattctcctattacaaggtaaaaggcggcatatttatgaaagccaagacaaacaaccagcttttgttccttctgttttccgccgcggtcggcggtgtgttttccgttatcatctgggcgtttctaaaggtcatgcagctcggcattacactgctttgggagattgtcccccagtctgtccccattccgagcgccctctatactattgcgctctgtctgctcggcggcctggcaatcggccttcttcacagatttttcggagattttccagaagaactcaacagggtgatgtctaaggtaaaacgggaaaaacggtacccttaccataatatccccatcgtcctcgtcatggcggtgctgccgctcatatttggcggaagtatcggcccggaggcagggcttaccggagtagtcgtagggctttgctattgggcgggcgaccggttccgctacgcgggcaaaaacctccgtgaactgacaaacattggagtcagcgcggcgctcagcgttattttccgcgcgccgctgttcggttttatgatgccgatagagcagagcggcagcgaggaagacgccccctttccaaaatcaaaaaaattagttacctattttgttgcgattcttgcgggcgtaggcgtatttgaactgctctcgagctttttcggcggcgggctttccatgccgcgctttgaaaagttcgccgccacttcccaggactgcttttttgcagtaatccttgcggcggcgggtgtgctgttgggacttttattctttgcgtttgagcgtttcagcgagcttattgtaaggccgcttgtgcgttttcccatattaaaggggattttaggcgggcttgccctgtccgcctgtggaattttgctgcccatgacgatgttttccggggaagagcagacagcgcgtctgaccgatacctacggttcatatgccgctggggttttaatcgtcaccgcggtcgtaaagatgtttattacaaacttttgtattaaaacaggctggaagggcggccatttcttccccgcaattttctcaggcgtgtgcctcggctatgggctttcgcttttgctgcctattactccggttttctcagtctgcgtcgtcacttccgcctcaatgggcatgatgatgaaaaagcccgtctgcgccgctctcctcttgatgctgtgctttccggcacaaagcatcgtctggctgctggcggcagcgtttgcaggctctcttatcccggttccgccttttctcaaaagtaaagaaaatacatctggggcgctgtccgaagcggaataatcatgcaaaatctgcgcattcatagcctagaagcttgtattttaagaggcatacgccttaaaaagaaaaagaatatcatgtcgggtattgaaaaatgctgccggattgtgctattataaggtgtattagaatttttgggggaaagcaaatgaagaagtatctatgcagcgcagcgctgatcatactttctatattgttcctatgtttccaaaatatgatggcgttcgccgtgtggtccgacgacagcgatgccggcgaacccgaccagtcttattccgactatattccggagcccgtaccggacgacagcagctatccagaacctgagccggacccggagcctgaacctgagccgtcttcttcagattatgagccagttcccagcagcagctattcggagcctgactatacaccgccctcttcagatgactttgggggatacgaaagcaattattcgttctatgacgacagttcctacgacgatggcggcgcggcggacagcagcgacggtatgagcagcgcgggtgtggtttccggcgtagacaacgacctgtatgacgtcagcaaaacggttgattccaatgagctcaacagctccgactggaaaatcgcccttgacctgagcagcgggcaggatggggcaaatgattttaattttataaaaaacaacaaatcggctgacgacgagaattccaaccactggatgctgtttcttggcatcggactgattgcggcggcacttgccggtattatagggactgttgtttactgtgtgggcaaatctaagaagataaaggccggaaagggaaagggaacgccctcctccccttccaaaaacacacagcagcacgtttaccagccaaagaaaaacaaaatacagaaatatgatactgccgaaatagacatcgatttaggcggcagccagccgagggaccctcattgatttcaacatatcagaaaaaaacgcaggattatcttttagccgggtttatggtatttatctcgtgctaagttataaaatcagctctttaatcaaataaaaaaggattcccaaatgaaccggataccgaaaaatagacagtaaaaaagggactcaatcgtagaatagccaagaattacgcaagctgactccgtttaagaaagggggtcagtttgcttttgagctgaaacctctcgaaattgtagaaataaatgtagtcgtcaatcagactgcgcgcttgctgaaacgtctggattttttggcggtaaatgcattccgttttgagcgtaccaaagaagttctcggccggagcgttgtcgagcggtgtgccagctcttgacatagagggcaatataccgtattgtttggttaggttcaaatagcctggcgaggtgtattggaacccttggtcgctgtggaggagcagtccatcagcggcctctttttttgccttctgaatcgtgcggtaaacgagtgcattgtcctgaacggttcccatatcgtaggccacaatgaaattgtcgtacaggtctttgatgacgcacaggtagaggacgccctccctggtatgaatgtagctgatgtcggtaacccacttttgattgggacggtctgcatggaagttccggttcagtttgttttcatatatttgaaattgctgccgcctttgatacaagggtcttggacgacgtatttgtgcaagaaggttgtatttgcgcatcagacgcagcaccgccttatggctgatgaccagccccgtctcgtagagtagccaaagcctgacccgccggtatccgtaggtgtaattcgtatgttcctgacattcttgaattagttttcctaatatctcatcacggttgggctggtcttttcgttttctccatgcatagtacccactgcgtgatacaccgaaatatgcacacaaatacgacactccatacttctcccgggtactctcaatcgccgcatacttcaccgacttcctcacctccttccagcagcgtgcagaattccacttcccgttccagttcctgtatccgttgctgtgacgtcattggtgtttttcgcggcctcccttttcgtttggggacagctccctgggctatctctcgttcccgtctgcgctgtctctctaatagtttcctcacctgtttcatctctaagcctgcttcttttccgatttcccggtgtgtcattccttttcgttccatttccttgatgctctctatttgctcttcactgtagtgcctcattccttttttccctgccatgacaaaacctcctgttgtagtttctatcctacaacaggaggtccttttcttcaatgtctattttttcgcggtcagttcaaaattgggaatccttttttgttttccgtttatttatatgcgactatgacatattggccgccgctttcgttgaggttgcaccgcacgccgagcgacgccgtgctttgctgcgttaccgttacctggtttgcagaaagggaaattccagcgctgccgccatacgtctgcgcggcaaaaccgccgtttataatggtgtctccgcttgcgttgagagtaagcggagcattctttttatacactacaaccattcccggcgggaaatcgaacgtataggtaaagctcgaagcgccggtgccggcatacatttttacagcgtagggcgccgtgattttatttttttcattctgtgtcacatgtatcgcgccgtttgccaaatgcccgcccacctcttcatcgataatgcggttatcctctacaaaatccgcgcgaaccggcctgtctgacgcaagccataaattgagccccaggtttccacttttttcactggatgccatgctttcagtcctttccttaaaattccgccccatatgcttcaatctctttccacctgagattttttgcgtccatataggaaaatgtaagattttttcggtcgattgcctcccaatcaagcgtgcggaaatccatgattaagtccagatgcgcaggcagcagggcctgcgcctgcgcggcaatccattttttctgcgccgccgtgtatgccccgctgcagacaatatgcagtgccatctggcgcgggtattcaaaaatctgtgctttaagccccagggccgacagcgcccgctgtgttccggatagggtaaaatcgccataggttagagaaagccgtgcaattaacatttctctgcgctgctttagcgaaagctccgtacggggcgcgcccgtaatgagctccagcatctcaagcccaaagctctccgccgttttgaccacgctttcctgcagaatttcatcgagcatttcgtttacggtatcgagcgcagcagcataggcacaaagctcccgccagacggcgcctgtttccctgagtggataaatcccgagcggcaaaagccccttttttaaagattccgccgcgctcatgccccgtccccccactgcgtgacgacaatatccttgagcacatagagctggtttggcagcgccgtactgtcgcttgtgtaataatcgtcaaagcggtaagaggatacccccggcacatgaaagagcgcttcccccacactggacaggcgcacgtcctgcccgacggacagcgagtcgaaaaagccgcgtaccgcctctttgcactgtgcgcttacctcgtcaaaatcgtagccctcgcgcaccgccacctctgcatatatgctggcgctggccgtctgggccgcctgtacctttacgtccacgtttacctcacgcaccttatccatatattcctgtacgcgtgcaaccaggccgctccccgcgggagcggccttacccgcgagataaatatccacggtaccggcgccgcgtccccttggaacaacgtttgcggaatatacgccttcaaagctttccgccgcattctggtaataggcccggtttgtcccgttcggtacgtccctgatatgctctaaaacacgcctgcgcagcgtatcgtcgtcctccgcgtccataccgccatccatagaactcggattagtcacccggctgattccggcgggcggcgtaacgataaccgtcactgtatccttcgctgcgtttgacccactgcccgcgttgaccgcctgcgcatgaaggtacaggaatttatttccctttttaatcatatccccgcgcgtcgtcacgaaccgcacagggttctccccctgtgtcgagcagacgcagccctgtggaatatacaggtcggtctccgcctccttttcaattgaaaaaagcagcactccctgcgcaaactgcgccgctttgcgtgataggccgcgctgtcctgcgtgataatcgagctgttccccgccagctgtctgtacaaacatctggcgtttcagccactcggcatatgactgcatagaaaaaatttctcccgcgagaacctttaaacggatgccgatgtctgacgcatcgtccgcgctgtaccctgacaggctctggaatttctcctgcatcctttttaaaatcgtatcataggtttccattatattttcatctccagacggccctgttccccgccaaattccaataaaacagagaggccaagctttttttcattatcaaacgacgcctccacatccaatattttgacctgtggaatttgcgctgccgcctcctttaccaaaagcgccgccgtttcgcccagcggctgtacgctctcagtaagcgtatgcagttcgctccccagctccctgtcgtagggaaagctccctttttttattttcaggcataagcttacccgctgcataatctcagaaagcccgcttaacaaataaggcattccccgtccgtcaagctcaaattcgccgttaccgtttaatgctgtgtccatctacgcacctcccgcaatcactttgccgtttgcaaggattgttccgtcgtttttcaggataagctccgccccgcccgcggaataaagcataatctcgcctgcctcaagccccttgtcctttacgaatgagccaatacatacgctgccgccggaggcaggcagcagcaccgcgtccgcgccctcgggcggcacatatgcgattccatacggggctgcgaccggaacgcctacatgttcgcccgacgcccgtacatttacgcgcccgccttcggacaacgcaaccgtacccttatccgctatattgtatctctctactcttttttcagccatttgcttcatcagccacatgtcagttcctcctctatacggttgagcgtcagtgtcgtcgcctctttgcctggcagcagcctatactgcaggccgcttacataaagattgcgatatgtttcgccgcatacctctgcctgcgcggcctttcccagaaccgcggtcattctggcggggcaggtaagtaccatttcaaacgactgcttccttccgcttttaagtatcgtatccgcccggcttaccgggaccgaaagcggattcgcggcgtttaggaaacgctctcttttgattcggcttccctttgcctctttatcctctataaccatatcgtagccttggtcaatgcaggttttgacaaaaatccgagataaacgctgatacctttttatttttacatttccttctgtaaagggaagcccctcccttccgccaaagcaaaggggcacgccttcttttttatatccgcacattaaaacacagccgtcgggtgttacggcaggcacactgtcgagacagcttctgcaaaacaacgacaaagcctgccactgcgacatccccttcagaatttcaaaccgcgcaggcctctccttcctgtcgcaggaataccgcgtaatccccagcggcaggacatggcggcggaagatatcgtctgcgccgggccggtcgtagcattgcggctgcgcctcgttgtcgagcagcagcgcggccatgctccttgcagttattttaaggacatttccgcttgcggagcaaaacacttcctgttcatccacaataccgcagaataaagtttcatccccgtctgttaaaatgatttccgataattctggtacggcagtatatgcaaaaaccgccgtcaaatcgtcggccggcgcgccttcttccctgttgatgcacaggctcagcggcataggaagcgcaacgtctgcgcccagggccgtaattgcactggcattcatggaaggcccaccttctctcctgttttcagattatccggtcgcctgatatccggattttgctttaacagcatttccaccggcacgtcatatcgaaacgaaatgtcccaaagtgtttcagcctctcccaccgtatggaattttgcgccgtctgaatattttacaggagcaccatttctttcctcaagaaaaacaaaccgatagctcaaaaaatcatcggcgggcggctgggtaagctccagcatagtaaaacgcgcaaaaaacggctcatagccgggcagggaaagcaaacccctttttcccttgtgcagcagcgattgcagttctttatattggcgcacgcaatcgcgcccgaaaaattccccggttcccgtcacggtcttcagcccgtttcccatatcctgcaaaaggctgccgtaaggcgtttccagctcgttcaaattccgtttgtctgttacctcaatacttttgggattatgctgcagggaaaacccgcaataccgcatagaagcatgtatcatggccccgtctcctcttcctctgtaaacgcgcccgcaaaccggcgggcgtcctgctcaaagacatcggacagccgccgtgccctttcattatcgtcaagataccctgacgcaaacgaaaacgcctcttcttttttcttgaaatcgccaatcattctgattcctccatttccactcttttttccgcgcggattatggctttttccgtcatatacttgccgctttggaaggactgttcaatgcgctcccagtggcagccttcaaacagcacgtttctgccgccggatttcatgcgcaccgtaaaattatcgagtgaaaaaatatccgtcgcgcttttttctgtcaaaaaacggccgagtgtgattaaatgcgccccgccgcggcaaacaaaaaaacgcgcgccgccttccccagagcattcagccggataaacgcggttttcagattctgcctgcgcattctgtacgaaaaatacaggtaagccgttaatagaaacgccgatggtacgggcatcctcttccagttgtgattccccgtcatgcagcgtttccaaaacagtaagcttcagggttcctttaaacgcgcaggcattgctgtcgtatttgaccggataggattcaattttcctgtgttgtgtattgtccccgccgcactcgagcacctgcgcaatttccgcaagcgtctctgcacaggcttttccgcccaagcccaaaggggataacaggtcgatggtaataatcagctgtttttctttcagtatccgctccgacagggcgccgcccttgacatggctctttacgccgtcgataccgactgaagccgtcagtccttttacaggagtctgaaacggctttctcgcgtatgcgcttacaaaagtaatttcatgcagcgcaggcgcttcttttaattcctgtaaaatatcctgctctactagattaaacgctttcatcaaatgcctccgcttttgtacatggagtaatgacagcccatacgtaaacaggctcatcctgaaacagatgaacctccgcgcgcttgaccctataggccgttttaagcgcggggcagtctatcgtaatctgttcaaagggctctgtaaagagtacgtccggcatcccataatataggtaatgcccgccgtcgcagtagccctgcggcaggtaatggccgtcgatgtacattttgtttttgtaaaaaagcggatgtatcagcgctttggttttaacgctcggcccgctttgcgatataacaacggcgcttccatactttttaagcatctgcctgaccgatacagccgtgttcatggcgccacccgcccaaaaaagaaattttcatccttcatgaaaggtgctatttccgcctttgccgcttcccagaccgccagcgcgcgctgccggagcgtctgctgaacgcctatgctgatatcgcccgcctgaaaggaggtaatatcctcagccgcgctgcaaagcgccattttgtatagggcaagggcggcggcggctgtgttcagccgcctgctgttctcctcctcttttacatttgttttgagcatcccgcgcagctggccgattgcatccaaacaaagcgccgaccacttggacgcctcttccgcgtccaagccggaaatcaacagaaaccgttcatagacctctttaaaattcatcccgccgcccccatttcttaaaaagtaagctttttagcggaatcggtaaaaattttagcaaaacccgcaatacagctgattgccgcccgctccaactgacggtcaatcagcttatcgtaatctgttaaaatatccccggcctgcaccatttcgagcgcacagcttttatcgagcccgatgatggtgttgccttcaatggacggtacatgaatcagctgggcgcccattggcgtaatcatttttccggttccctggaacgtcagccctgcctgcgcatcctgcagctccgccatggaaagcagcttctgcatgacagctgtcggcgcaaggattgtattgagctcgtacggcgaaagcccgccccaaagcttgagcaggctggaataggtaagcccgtctccgtccgccgttaccaccgccgccggattgccgttgccgtcgccgttcaacaatacatcgaccgcatccttaagctgtgcccgcgcgatatacgcgccaatctggcgcagcgttaccgtaaagaggtcgagccgctggaagcgcagtgcctcataggaagaaacgagcatcctgccccttttctgaagcttgacgagattttcctgcgttttgacgaccgtctgcgggattgccgcgccctccgccaccggctttaggcttttgtcgtcctgcgtcggcgtagaaacaatactgcggtaatccattccgtcaatctttgtgacggccgccgtgatgttcggcagtacgtcggctgcttccatcccctgcctgacagcacggcttacatattcgggaaacaacgccgaagaagagctgctctggaaaaatttttccaccgcgtccgagttcgcgccgctaaccttgatatcgaaacgcttgagctggcgctggaacgcgtcaagcccggaaagcggcgtgccgttgtagttttccgtcgggtcaagctgttcgagcacctgcgtcatgctttttcccctgactccgtacatgcctttttcaatcgtgatattttcatacattgccatctgttatccctcctttaaattaagattccggcattgccatccgccgcgtcgagtattagatgttccctgccgccggataccgctgcctttactgccgagccgtccgccgcggacagcttttgaaaacccaatgcaacgctgccgcttaccggcacgcacgcatagccgcacgtctgtacgccgacaaaacctccgcgcacattggccgcaatcccgataaagtcgtcgccgtcttcgcaggcagcgacctccccgttctgcgtaagctttacgagcgaccctttttttaccgtctcatcgcattcaaaggtaatcaacttctcatcataaccgttgaaagatactttcatataattcatcctctcctatttcccgtcgtaccgcacatgcgctaataattttttataacccgaaaccgggctggcttcagctgtgagcggtgcagacgcaatcaaatgtggtattcctgattgttttcaatttttcgttcctgcccatccccttggaaaagctgcggcttccgctcaaacagcgcggcgctttttctttcatatgcgctgcgaaacgccttgagctccgcaatatccatcttgtctgccaggctttccatcatgcgtttgccgatatccggctggacaagtacgctcaagcgcacgacttcgcttttcaaatcctcgtggtactgcctgccgtactgcgcgtctgcctcaagagtctggagatagctgtatagctttttcacttcctgcgcgctcaaggagacatcccccccaaaagacaatgcctttgtaatttccttcagctccttcacctgtccttcttgcgtcttccaagacttgataactccagccgagcgctgcgctggtacggcgacgaagctccattcatacgcgtccgtcactccagtgagcacgtcgtggcagagctttccgccatatgtcttgcccttttgatggcggcaggcgtttttcttcctgtccgcaccgcaaattgagcatatattcccactcaccgcgcagccgacgcttacctccttctggatgccggaatccagcgcaaggataaaatcctcgttccttttcgaacgcggcaggtatgccttagcaataagccgcaggtaatcctctcccgttcgggtttttctggccgtgattctctctacggtacagtcgtagatacgtgccgtttggttttccgccttcgggtcatggtcgaacacacccgttttgcctacaaaaagctccttgagcgtatgtaacgcctgctcgtcgaaccgctcaaaatcgcggtcgatgtcgttgtcgcaaagaacaaccgaaaaggtgtaaacctcttcctccgacatttccctgcgcgtatagcggttaatcagcgccagctcttctttattgagctttgcgttctttataatctgtccctgcttcattttgttccccctttgcctgttcttcaagctgccgggcctgcgcgttgagaagccttgcgtttgcaagctgcgtttcgtcctgcaggttgatgttgttccagcaaatttcaaattcctcgtcctcgccgttcatgcgcatccagagcccgcatatcttttcaatcacaggggtgagcaggttcctgtaatattcaagctcactcgtcagtatgtccgcctgctggctcgacatgcgctccgtactcgaccacgaaaggccgagcaaaaacggcggaatcgaaagctttgcgataatctgctccagaatctggcgtaccggtacctcgctgtcgagcacctggttatccgctccgatgaccttgacgttcacatcgccgactgaaacgaaatcgctcacctgcccgctgtcacgcatggccttgccccactgttctgcaatctgctgtgcccgctcacgcgtgaaggcgcgttcgctcatatcgcccggcggcttgtatgtgacggcaaacctgatgtttccgacccgttcccagttgacgcccaacgtatgaaagattttcagcaggattccaccaacaaacggaagcccttttaaaacggacgtcccgcatagctttcccggctcaggattcagcggcgtgacgagtatcagctcttgattcggcgcggggatgctttcgcccgatgcgttattcatgcataccgtaacgtcaagcgggtttttctccgccctgagttcaattccctcaaggcttgcgttataaagcgccccgatgcttcttccgtctgagcacggcacaatttcccctaccgcggtcccataggtaagcatctggtcgagatacgccgataaaaaggctgttatgccgcttgagcatccgccaacttttaccgtctttaaaaacgtattgattcccttgcgcacgcgcgggctgccgcattctactgtaaagtcgccggtcaaccgcactgttttaagaatagctgcgtcgattatgggaaccgcttcccgaagcgccgcgtaaagcgtatgctccgccgttttcagtggtacatagccatcgagcgcccgaaacggatgccggcctgagtttaacccacgcgccgtctgcacgctggaaaagcagtcagccattctgctgttttttctttttaataggcccacagcctcacctccccgttcgctgtgcggcgatggcataaatgccatcgccctgttctaaaaatgtagtgacaaaataccggatgtcgtccattgcgtggtcgttttccttcaatggaatatcgcccgcctgtccgtcggaccagcggtacaggccaaattcccgaattgcgtccgtacagcttttacagatacggattctcccttccttgagcgccgtggatgttttccgtattccgtccagtacgctgttgcgagcgggtattacatggtattttccgtgacggcggattgtctcgataaagctcagcgccgacgggtcgaccacaatccccgcaggctctcttccgtccagcagccggcaaagctgtacataatactcttcatccgttttctggaagccctcccttttcgaatcaaagtaatattcgccgattcggtaccacctatccctctgctcgccccataagccaaacgacgccggattttttgtaccgtaatcacaggaaacggcataacgctcaaacggtcctgagggaacctcacagaacatgcctccctgtgacataaacgggtagacggcgccttgagcgcaaacccatttcccctcgacgaaacgctcgtaaaacgttcccgtataaagcgtccggtaacgcctgagcatttcttccggcagggaaggattgtcctccatcctaaaatggaggtagagggcgtttttctgttcctgctttaaaatccattcctgccggaaccagtgctggggatactccggattgcaattgaaccaaaactttgagccgtttacagagcatctcgcgattgcctgctccacaaaggaacgcggcataagggccacctcgtcgaacagcacgccgcaaagcgtcatgccctgtatcagagcggcggaggattcatcacgcccgccgaacaaataaaagcggttcacgcatgtcccgcgcgaaatctcaatcacattggacgaaaccttttcgcggcagacaaacccaagctcagaaagcaccggaaacaggggtatcacaagattgcgccgcagggaacggattgtcttcccgcaaagggcaaagctttttccctcaaaccggtagaaagcccatgccacgaacgaaatgcccatacacatcgtcttgccgctgcgcaccgctccatcgcatattatggcgtctttcgtatggtccgcgctttcttcacaccaccaggtaagggcgcgcagctgcttttgggaaaagggataaaactgttttgtcattcctcgctatcacccttccggcgattctccagagcgcgtgctccagactccagcgctttataaaacggtaccgcttcgccgcccttttgctcctgcaggccggccattttttcaagcgcgcgcaggcggtcgtagaacttaatttctatcatcccgtccttcggccttctgatttccgcgacgttgaacaaatcgaggtcatcaagctcccgcaaatcaggctcccgcataaacaaaagctttacactgtctgttggattcgaaaatacgagccgttcatatccgcactgaatcctgtaccgcagaacctcttcccttctggaaagcagccggccaatctcgtccgtaatatccgccctgcataaaagctcagcgcctgcggtttccttttcctttgggaatcctgctttgcgggcggcttcctccgcattgccgcactcgacatagcagccgcagaaaagacgttcttttttagtcagtcgttttttatatttttgttccacgcaatccccccttcttttgtaagcaataaaaccacttacaaataacacggcaaaaaaataaaaagttgaccggatttggtcaactttgaaccgaaataaaaacagcgcacagataacctgctaggaaatctgtacgcctgttattttaaaaaacttattataaaactgttacagcggcgcccgccgtttcagcccggcggcgcctaatgcgaagagaggataattataaaaaatctgggctgcacggcgttccttgcgcgtacagccctatatagtcaaaggggagatttcaaaccccgcgttatccgtttgctttcttcctttgatgtttttattttaaccgctaaattaaaacaaagtttaatcggactgtaaaaaaattgcatgttttttattgaaaaattttgaacaggaatccgtccggcatattttaacattgtatgaaataaccggctttttctttactccatgtgcagataatgttataatctgtttgataacggaatatacggaacattaaaaccgtatatttttttgaaaggacctgataaaatgattcgctgtccaaagtgcaacaacgaatacgacgaacagctcccgcaatgtccggcctgcggatacaacccgcaggaagatgtttcacgtatactagaggaaacaaaatctctttatgacgacgaccagacggtcattcattccgataacgatatgcagtaccacgacggctttgattcccccatggacgaacaggaaccgccggttgacccttccatgggctttgccggttccgcctccggaacgccagccccagccggcagcggttacggagacgattttggcgcggcttccccaaaggaggaaattcccgagaaactcagagaatataatgttgacgtcaataccgcgtacaaaaaacagcgaaaaatcccgctcggcgtaaaaattataattgccgtcgtcgttatactggccctgcttaccgccgcgttgtttgcgaccggcgttttcaaactcgataacggtaattttgtatttcgtccggaaaagctgccgggcgtcgtttcccaggtgcctaccggcccggacggcaaccctatttcaagcaataagccgtcaagtgagcttccgactgatgaaaacggcaatgccattcaaaatagctccagtggcagtatttccaataatccttcggacacgtcaaacggctcttccggcggcggacagtcctcaggctccaacggcagctccacggcttccggcagcaacaacagctccggcggcaatcctgcttctggcagcagttcttccggcggcgacacgtctggcggagaatcaaacaataatccttctggggcgattacaataaacggaaaagaattccaggtcggagataccgtcacctatactgcctatctcggcggcgtaaacaaaactgtctgcggtgtaaacggctatgtaaactataattccagcctcctaaagataaaggaggactccattgagtttccagaaataggaaacccgatatataacgcaaaggagaaagaccagctgctgttcaattccgcaaatctcgacggcttcgattttgcctctgaaaaggtgcttgttaaagtctccttcgaggttacaggcacatccagcgcaacgtcaagcgatatttccctgacactttccgagctgcttgacttcgacggtaaaaagctggaaggcgatttcacagaatccgtttccaaatcctgacgacaaaggccgtccagaacaagttctggacggcctttttactcaaaaacatcattaaatgagctacctgctttggcctgcattattccgtcatgaacaggatgccaagcgtgttcggcccgcagtgggaggatatcgtacagcttgcgcgcgtaatcagaatttccttaaaatagtttttgctttttaacaggtcgtaaaccatctgctcgcgttcttttgaaatacccgaatgcgtaataaatatccggtctgtcctgatgttgccgtactgtgcaagcttttcctcaacatagttctgtaagaccttttcaagcttcccgcggtattttttcccaacgcccattgcgcctccgtgctcattgtccacttcaatacagggctttaaattgagcaggttcgcgccgagcatcgtaactgtggagcagcgcccgccagcccgcataaagtcaaggcggtcaataataaagctcgcatggctctttgcagtaagcgcctgcacctcttgcgccgtctgccttgcgtccatcccctgtgcaattcgctgcgcggcttcaatcacgagcagcccggttcccgaggaaaggttgcaggaatctacggggtatacatgccccagctcctttgcggcggttacgcagttctggtgcgagcctgacaaagcgctaccgatattgatatgtacgatttcatacccctgctcgataaaagggcgaaaggcgtcgatatattcccctgcgttgattgccgaagtcttcggcagctcccctgttttataaaaattgtcatatatctcatccggcataatgtttacgctgtcttcaaagcttttaccacccagcacgatatgcagtggataagttttcacatggtaccgctgcataagctccttattcaagtcgcaggtactgtcggccgtgagcattactttcctgtccaaaattattccccctcgattgtcacgataattattttctgacaatatattttcccggttcgtttgtataataacaattataaagaaattacccggcaattgcaacatcaaacgccggttcaggaggaagttttcatgattacatattaccgcttcggcaacccgattaatacgcaggcagtcgtcgcagaattcatccccagcgccgacgctcctgattttttgaccctggacaaaacggaaagctcccttcggctctcccgccggctcggtgaaaacgacgcagtatacggacttggacaagcaatccgcggtatcgataaacgaggctggcgttatgaaagcttttgtaccgacgacccgaaccatacggaaacaaaacgttccctttatggagcgcataacttcattatcgtaagcggcaaagagctatttggcgtatttgtggattttgcggggcgtgttgtgttcgatatcggatatcaaacgcacgatttgctcatgattgagccggaaacacctgatttcaagctctatatcattacaggggacagtgaaaacgatattgtcacgcaattccgccgaatgataggccgcagctatctcgcgccaagatgggcgttcggtttccagcaaagccgctgggggtatcaaaacgagcaggatatccgcaatgtcgtcgaaggataccggaaaaacggcattccgcttgacgcggtttaccttgatatcgactatatggacgatttcaaagatttcacagtagataattctaaattcccccgttttcctgaatttgtgtcggaaatgaaggaaaagggcgttcgcctggttcctattatcgacgcgggcgtgaaaattgaaaagggctacagcgtttacgaggaaggcgccgaaaacgggtacttctgcaaggatgaaaacggcagggactacgtcactgctgtctggccgggacacacgcactttcccgactttctaaacagcggcgcgcgccggtggtttggacaccagtacaaatctctgctggattgtggaatagaaggcttttggaacgacatgaacgagcctgccattttttattcggaaaaagggcttttaaaggcttgggacgcgcttgcgcaatataaaaacaaacggctggatatttattcgttctttgatttacgcgacctgtttggagctctttccaacagcatggacgattatcaaagcttttaccacgatatggatggcgtgaaggttcgccacgataaggttcacaacctgtatgggtattacatgacgcgcagcgcggcggaagcattcgaggaaatcgttcccggcaagcggattttgctcttctcccgttcctcctatgtcggcatgcatcggtacagcggtatctggacaggggacaatcagtcgtggtggtcccacctgctgctcaacattaaaatgatgccgtcgcttaatatgtgcggctttctctacacaggcgccgatattggcggtttcggcggcgacgtaacgcgcgacctgcttctgcgatggctcgccttcggcgtgtttacccccttgatgcgcaaccactccgcgctcggcacccgtgagcaggaatgctaccggtttgacgatacaaaagcgtttgcagacgttatatccgtgcgctaccggctgattccctatctttacagtgaatatatgaaagccgctttaaacaataccatgatgttccgccctcttgccttcgattaccgggaagacagccgcgcaagaaaagtagaagaccagctgatggtcggcgacagtatcatgatagcccccgtttatgaacagaacgcctcagggcgctatgtatacctccctgaggatatgctttgtattacgctgcgcggctctcagctatgcaggcattccattatgcgcaagggcgaccattacatagatgtagcgcttgacgaggttcctattttcatcaggaaaaaccatcttctgccgctgtgcgaaagcgccgcgtgcaccggcgggctcaaccgcaggcagctttccctgattggttttgtaccggaccaggcggtatacctgctgtatgacgacgatggcatttcaagcgtttgcgacaattcaagcctgactgaaattatggcaaagcggacaatgggcggctacagcctttcttcttcagacctaaaaataacagttctcaacggaggccttattcatgaataaaacacccaaacgttatacacttggggaagagattttcaactctgtctcacacggtgccggcagcctgctttctatcgccggtaccataatcctgattatattctccgcgatttatgcaaatacctgggctgtcgtcagctcctgtatttacggcgcgtccctgattatcctgtatacgatgtccacactgtatcatgcgattacaaacgaaaaagcaaaaaaatttttccgtattatggaccataatacaattttctttcttatcgcaggaacttatacgccgctgacgcttttctgcctgaacggctggctcggctggacattattcggcatcgtctggggcgccgcaatcatcggcatcgtattaaattcgattgatttggaacgctttcgaaagccctctgttgtctgctatattttgatgggctgggtgattattcttgcaatcaagccgctgatggaatccattcctcagatttcgctgattttcctgctgaccggcggcgtgttctatacggtcggcgtaatattttacgcaatcaaaaaaatcaagtactttcactctatctggcatctgttcacaatagcgggaagtatctttcattatttttcgattcttttggctgtcatggataaataaatgaaagcaaagcaaaaatcccatttgcaaaccagcggcagcgctgtacagcaaatgggatttctataaaatgtattcctttatttaatcaggcaataatttccccgtccaccgttccggtaagcccggcggcgttagattcatcggtatcgatatgcattgcgggtgcaaacttttcgctgaccctgataacaacatcgccaaatgtaagcatcctttcctgagcgcctactttgactgagacagtctgcttgtctgaaagaccaaactcctgggccgtctttgggtcaagatgaatatgcctctttgcggcaatcactccgcattcaatgtccatttcaccagcagggccaattagcttgcagccaggagttccggcaatatcgccagactcgcgtaccggcgccgcaataccgagctttcttgcatccgttaaagcgacttccacctgacatgcgcttcttacaggcccaagaattgacataacgagttcacctttaggccccactaccttcaccttttccatacaggcaaactgtccgggctgggacaaatcctttttatttgtcaggacagcacccttgccgaataaagtttcaagcgcctcctgggttacatgcagatgtctcgccgaggtttcaaccataattttcattgccttgaccaccatttctccgcgcttttccgcgcgcgcggaacgcatgattttactattttttctgatattatattacaactgttccgctgtaatttcaacctttccagcaaatattttgcgcctttttaaaacatatgttataataacctcacgccgcaggccgaaagccttacaaaagcaagccttacggcggctgggagaacattgaaacatggtgcagaaatcgtccagcgctttccttgctgtgggttcggctgccttgcagccgtttatcatgttataataacctcacgccgcaggccgaaagccttgcaaaagcaagccttacggcggctgggagaacattgaaacacgcaccggaacggaaggcgcatccccttttaaccagcagttcttgtgttcatgatattgtaaaaagcagtattggtattcgctgttctctatgtttatatttttgacaggctaaaacagacggcattccgccgcaatatacaaaaaaaatttgtttaacagtacctatttggaaagaaggaaaaacatgtacgaatcctgggaaaatttagaacgcgattgcctctgctgcgaaaaatgcaacctatgtaaaacgcgtaccaacgtagtcttcggcgttgggaatcaaaatgccgaggtcttatttataggagaaggacctggccagaacgaggatttacagggtgaacctttcgttgggcgcggcggccagcttcttgataaaatgcttaaagccattgaccttgaccgcaacaaaaatatctatatagcaaatatcgtcaaatgcaggccgcctcaaaaccgcgaccctttaccagaagagcaggaggcgtgcattggatggctgagaaaccaggttgctttaatcaggccgaaaatcattgtatgtctcggcaggatcgcggcaatgaaaattattaaaccggatatgaaaatcaccaaagagcatggtatattttttgaaagaaatggcctgcttatgatggcaacgcttcatccggccgccctgcttcgcaatccccggcaaaagccagacgcttttgaagattttttaaagctgcagaaaaaaattaatgaaatatgcgaacacacttataattagattgactgcaaaacactgtctgcctttatcgtcaaaaaaagccttcccggtactgggaaggcttttcgtttgcaaaaatattgcggttaattactcagaaacctttttcttggaagcaacgactgccacgccaagagccgctacaaggagcactgcaagcgctacgaagggagtagaatcgccggtcttggtagtgccggtgcttgcggtactgctcttgctgcttgtatccttgttttcttccttcttgctggaggagttgttatcgccggagtcgagctttaaagtctttctcagctcagcaaccttctcatctgtagcatagtcaggataatttgcaataaatgcgtcgaggacagcctgcggatcctcaccgggggcaagcacttcaccgacaacattgccgatgcttgtgattgcgaagtgggggccgtatttgctgccgttgtttctccagcgcgcagcattagtcattttgttggaatccatgggattctcaatcatttcgtctgttacataagcggtatcgccaacacattcgtcaccaagggtgaggtcatacgtctggacgcctgtgcttgtgctgaaaataaccatgtcccagtctcccgccgggatttcatagctccacttgttgttgccttcttcggtcattttctcattcttggtctgccatgcataaagctcatctccgccatttttccaaatgtggcagtatacggcttttgcagattttgcccatgcttcgggaagctcaacatagaccttaccgccgctgaaggcagacgcactgataccggcaacacaaaccatggacacaaccataacagcgaccagcagtacgctcattactttcttggacatttcttgtctcctccttaaaacgtataaatccgaagttcatacttcagtaccgtaattatacaatatataaagaaaaacttcaaccgtttttcaaatttttttgatagtaaatccacattaaattttaaatacaagcataattttctatgatttatacaaacagttatagataattggaaacagcatgtaagggccatacaaaaaacctcccgtccttacgttttgaggacgggaggttttataacttctaggtttcaggtcagcttaaaatcagccctgtgcttttttcctgcgcgcaataacaactacgccggcagcagcaaggaggattgtagcaagcacaaagaaagatgcgacatcctgtgccgtgtttacagtaccaggattctttccggtgccattggtcggattggtcgggtcatcagacgggggaagcgtcgaagatgagggaggatcaatcgggtcaaccggacccggacggacataagagtaatccatatcgaagtacgggttcatattaaatccgttttcatcaatcattacttcaccgtcaactgtaagaggctgtgtcgtctggtcgccgttcagcgggttgaagtaggaccagtcgccgagatataacaactgtatttcacctgtataaggattcggttgtttaatcgtctcaccattgagctcaaagatagagccgcaaaggtcgtcctgctcaagctggttgaacataccgtcttctacattgatgtcagctgtctggagagcagccgctttcttggcgggatcaaaattctcatctttttcaaggccgccgttgataccgttgttccagataatgttgttcgcataggaaggagcgattgcgtagtaaacgtcctcatatccttctacattcagctttgtagcaggaacaccaggccatgcggcgccgctttcctcaccatagaaccagtagaagccaatctcatagccgtcctctttgtacttggcattttccatccactcagcgggagctctgaaataataaatcctgtaatagccgtcccaatccggatgttctgcattgccgggctggccgttgttatccataactctcgcaggcatacctacgcccagcggaaccggaatacctctttcacggccatactggtcagtagtggattccgtgtcgccggtcgggtcggttaccgggtcagttgcaggatcggtcaccggatcggtcgggtcggttgtcgggggtgttgtgggtttcgtgtcaggagccgtcgtcggctcgtctgtcgggccgctcgtcgtcggagtggtcgtcgggtcagaacccggatcattctcaaaataaggggctaattcctctctgagctgcgcaaccttctcttccgttgcaatggtcggataattcgtaacaaaggcctcaataatgctgtccagcgtttcaccgggaacaaccgtgctgccaacaatgttgccgatgctggaaattacaagatggggtccctggtccttgttatttttccagagagcttcaagaaccgttttattagagtcaaccgggttctcaagcttatttccggtcacataggcggtatcgccaaggcatgacaggttcatcgtcagatcataggtctgatccacctggtacatgctgaaaataaccatgttccagtccacgctgtccggctcggccggagatttcggaattgtgtagctgaaggtacggccctcaacgagcttcatcttttcagcctttgtctgccaagcagacagttcttcacctgcgtttacccaaatatgggcataaacagcagatttggacgtaatctcgccccagctttccggtacttcaaaatagatggtgccgccttccatttgctttgcgtcacttgcgcctgcacttacgcctgcaacacacagcatggttaccaacatggcaacagccagaagtacgctaagtacttttttggacatttttgtctcctccttaaaagcttttcttcaatctgaagcagatacttcagtgtgaatattatacaacattcaattcaaaactgcaataacttttcataacaattggatgtacttcccctgaattatctgttttgaacaaatttagacttcatattttttcaaagtgtacaaaacaaatgcagctttatccaggaaaaaacaaagagcattcccaccaaatagatataaaacaatagtaaccccccggcgaagccgggggttcttcatagacgggcaaagccctctaatactagcggcacgcgtcacgtcgcgttggtacggtctgccaatcgcgagagtttgttacttgctgcccgtaaacgggtttagaaattatccatcgtcagttgttctcctgccttatcctcgtctagctgccgtttgatgtactcttgtatcttctgcgcattcttccctgccgtgtctacataatatccgcggcaccagaattcacggttccggtacttgtatttcaactctgggtacttctcgtagatcatcagactgctttttcccttgagatatcccatgaaacttgatattgctatctttggtgggatttctaatagcatatgtatgtgggctggacacacctccgcctctatgatcttgacttttttccaattacatagtgttctcaagatttctcctatctctctgcgtttctctccgtagaacactttcctacgatattttggcgcgaatacgatatgatatttgcaattccatgttgtatgcgttaaactattcatgtcgttcattctgaatgacctccctttgctttcctcgtgcagttggctgaccgcacttctattttagcaaagggagttcctatttctacatcatcggcataagccttcttttgaaccactcgcctagcgagtggttttcttcatacaaaaagccctccggaaaccggagggccattcgcgtttattaatctgccgttctcaaataagagaatcagcctttaacctttttgcgtgcaaggactaccgcgccagcagcaagcatcaggatgctgaggagcagggtaacagatgtgctatcacctgttggaaccttgccgttagaaccaccgggtgttccgccattggtcggagcatcggtaggagcagatgtcggtgcgcttgtcggtgcgtctgtaggagcatcagtcggctcagaacccgtggaaggctcggtcggctctgtacctgtcggctcggtcggctctgcgcctgtcggttcggttggctctgtacctgtcggctcagttacgtcagaagacggctcggtcggctgaggttcagagctgccaggagttacatcaacaacaattgccccagtctctactgtaaaggtaatcgtaacagtagaattgtcttcatcaacgttaacaaaagcatttccggattctgtagtcgggtcgccccagctaatgccccaggaatgatcctgcgcaaccttgaagtcatactggccagcgtcaacattggtgtaaaccttctggtaaacgccttcgctgattttggtcatatcattgttcgcgtctgccggatcccaactgcttccgcaaaggtccgcgttgcctgcaatcgtataggtgtggtctgtaacgataataatatgctcgccttcagcccaagttttgtttccatcaaagaaaatggttatatcgcagacatcatcagtggtaaatacaacattgttgttgttgctttcagaacagaggcccttatcattataggtaacatcgaacttgccgtcttcgcaaatcttataagaatacgttccagccggaatatccttaaaggtaagcgtccagacgccatcttcaccctgggtcatcgggttctcagcagcattccactcaaagcctgtgagggttttctcaccagcgacattgtaggtgtgcttcggaccttctgtcatgtcagtcaggacataatcgatggggagattcttgttgtcgtcgtcggtcatgccgaggaactcaagaacctttgtctcaatcttgccatcgccggaggtaccgataacatcaaacttcagcgtgataagaacagtgccgtccgctgtgaaatcgtaaccctcgtcaatatcgttggaattgaacagtacctggcttgcgccgtcgaccgggtcaaagttcaggatagagctgcctgtataagcagttggaataacatcctttttcttaagcgcttttgtttcgtcagaaaccttcagaaggctgccgtcatactcaacataggcattgattccagccgcaagctcttcggccttcagataagccgtataagtaacctggtcgcctgttttcaccttaacgccgttgattgtcatggattctgccggtgcggttgtcggctgagtcgattcagaagaaggctcagtcgggtcgctcgtcacaggctgtgtagatgtagccggctcgcttgtaggctcgtcggtcgggtcagacgaatcgctggacgggtctgtttcgctcggctgagtcggctgtgttacatcaaagtacttctgagcaacatattcctccgccgtgaggtcgccgtcaatcttagtcgtctcggggtcgaaatcgcaccattcgccgggccatgtggtagcgccgccaaacgggtcgaagtcaggagcgccgttgcagtcgataacataaatgcagccattcatgtcgtcacggccttcgggccacttgtcgttctcaccgggatcgaggtattcgacgctcacgtttgctgtctggaaagcatacggtgcatcttctgtcggattgtcttttgttccggcgtcaacgaacgcgttccagataatcaccggagtctccttcggtacgtcataatagaacaggttcttgtagtcgcctactcttgttgcttcttcacccggccaggcaccgttctcagacggggtccaccagtaaatgcccgcgacgtcattcgtctcaagccactggttcggagccaggaaatagtacctgtacattccctcagcgggttccggcagatccgcagcaccggatgcgccaacgtttgtcgcggcgatacagcacatagatactaccagtaaaagtacaagtaatacgctggttaactttctcattggttttttcctcctaatattttttcgaagtctgtgtacacttcagcgaatttattatacactaagcaaaatgtgacttcaaggctttttggataaattatttatggaaatccgaacttttcacaaattatacaataagtattagttatttttgtggttacgacgaaagattattcgttcctgctcttctgctctgtctcggaatcatccgcgctgctgtctttgggagtctgttctttctttccgtttcttctcgctataattatgatgccggccgccgcaatacaaagcaaagccgccgcgccgcctatgataatccagagattaatagaatttgtacccgtatcctccccgctgtctttcttcgcctgttcgattcttttttcgacgtcctgcggagtaaccacgtcaggcagagtgccttctataacggagccatccagctggtaagcgctggagtccaccggcttgacatccatatcatacagttcttcgaccacgcttgtaatatcggaaattgttcctgcttcatccttgattttaaaagaaatcgaaataataattgcctcatcatctatttcgtagccccgggcggcgttcgcggagttgaaatacaccttgcccgcagaagccgtattgcatacagcatcggtaaaaactggaagatttgccgtttcttttataaccgaaagatgtttttcgtcgtattccacatacatgttgattccggcaacctttttgttgaggccggtaaagcgcaggatataggttacggtatccccagtcctgaccgtttggccgttcaccttatattccgcctcgtttgcggcaaacaccgtcactaacgaaaggcatatgataagcaaggcggtaaccaatgctgtaccggaacgaagtatttttttctttgtcttcataggactctcctccgttttcattactgttagcgccaaaaaagcgcggcgcgaatcacttgcagtctattataatataaaaacaaataaaagacaacgaaaaaagcaaattcatctatcggcaataacaaaaaccctccgggattaaccggagggtttgtttattcagattggcttcttatccaaactaatcttactctttcacacgcttgcgtgctaccacaatggcaccagctgccagcatgagaatcgccaggagcatagcaaccgaagtgctgtcgcccgttgtaacgccgttggtggtaccaccattagtcgggccctgtgtaggtgcctgagtcggtgctactgtcggtgcggaagtcggggcatttgtaggagcgtctgtgggctcagttggctgagattccgtcggctgtgtcggctggggctcagttggctgagattccgtcggctgtgtcggctggggctcagtcggctgagtttctgtcggctgggtcggctggggctcagtcggctgagtttctgtcggctgggtcggctgggtttcagtcggctgagtcggctgagtttctgtcggctgggtcggctgggtttcagtcggctgagtcggctgggtttcagtcggctgagtcggctgggtttccgtcggctcagtgccatccggaatataaccctcaaacttctctgtcaccttataatcggtaatcgggagattctggttgtctttattggtcatagcgagcagttcaacaatatttgtcttaatgctgccaacaccggaagccgctgtgacgtcgaacttcagcgtgataagaactgcgtcgtcaacagtgaagtcgtagccttcatcaatatcgttggagttgaacagtacctggcttgcgccgtcgatgggagcaaagttcaggattgagctgcctgtgtaagcaaccggaataacttccttcttcttcgcattcaatgttacgtcgctaagcttcagcaggtcgccgctgtaatcaacgattacgttgatgcccgccgcaagctcgctcgtcttgaggtaagctgtataggtaagctcggaaccctgcgtgtacttataaccattgataataaccttatcgttaaccggctgggtttcagtagcggtctccgtctctgtttctgtagaggttgcggtttctgtttctgacgggattaccggctcttccttgcttgttttgtcagttaattcaaagtcagcaatcggaggattctccttgtcggcatttgtcataccgagcagctcgtcgacaacagccttgattgtgccggtgccagaggtgccgattacgtcaaacgtgagtgtaataagcactttgccgtctgctgtaaagtcgtatccttcgtcgatgtcgtttgaattgaacagtacctggttggatgcgtcaaccgggtcaaagttcagaacgcagctgcctgtataagcaaccggaatcacttcggctttcttagctgccagcgtcttatcggaaaccttcagaaggccgccgtcataagcaacatgtacattaatgccggctgcaagctcagcgaccttcagataagccgtgtaaacgaccttgtcgccggtcttgaattctacgccgttgattgtaaccgtgtcggccgcaggagcagtagaagcctctgtagcgtccgttgcagacggctgctccgacgggtcggtcgcttcagagccaccggtcggctgttcgcccgcggtgatttcccaggagagaaccttcatctcggtctcactgaagacaattgtcatcgtagagttcgcttctgtaatttcgtacttgacatcgggcttgccaaaattggcgttgccgtcctgattgtactgattaaaagagtcccagtcggaagactgcgcgtcaattaccttgaagccacccgctccaaccggcaggtttgtataaacctttgtccatgtgccgtctccgttatccgtcatagggtctgcggtagcgggggcccagccctgcatctcgcctacaacgtagaaacccgtgtccgccgcggaaaagctggtcgcggacatgacgcacattgtcgcaatcaatgttaaggaaagaataacactgattactttgctgtgttttctaaacattttcagaatcctccttttgtttacgcttttgataagcattacaattatagcctatactaatccaaaaagcaataaaatttaaaaatttcacaaaaattaatctacaagaaagcgaaaaatttccatccaagttattgttatttttgtataaaaaatgttgtctttttagctttcataaccgtttaaattgtttttctgccaattccatgaatccctgcacatatcctccagatttttttccgccgtccaccccataatttctttggccttttcagggtccgcatagcactctgcaatgtcgccgcttctcctgtcttttattacgtaggggattttcacgccattcaccttttcaaaggtcttgacaatatcaagcacgctgtagccgattccggttccgagattaaaaatctcaaccccatcgtgctggctggcataattaattgcggcaacatggccctttgccaaatccaccacatgaatataatcgcgcacgcccgtgccgtccttggtgggataatcgtcaccgaatacggaaagctgcttgagcctgcccgccgcgacctgcgtaatatagggaagaaggttattcggggtaccgttggggtcctccccaatcctgccgctttcatgtgcgccaatcggattaaaataacggagcagcgcaacggaaagcttagggttggcgtgggccgcgtccgtcaaaatctgttcaatcatatattttgtccagccgtagggattggtacagccggtgggcatgccctccacaagcggcacgcgctcgggaacaccgtaaaccgtcgccgaggaactgaatacaaagcggttgacatcgtacttttccattgcttccagcagggtaagcgtcgtgtccagattgttgcggtagtatttcaggggaatctgcactgattcgccgaccgccttaaacccggcaaaatggacaaccgcgcctatttcgttttcacggaacattttgtcgaccgcgtccctgtcggccacgtctatatcgtaaacgggtacgtccacgccggtaatttccttaatccggctgacgacctcaggcttgctgttactgaaatcgtccgcgattaccgtttcaaatcccgcgtttatcagctcaatacaggtatggcttccaatgtagccggctcctccggtcaataaaaccttcatgtaaattcctcccgttttcatcacgtctaactcttatctgctttaacttgattatataatacggaaagtccaattacaagcaacgttttatttttgtgaaatataggacaaacggcctgacaatcgaaggaaagaacgtgcaggttatctcgctttgttccacattttttcagatttccatactggtaaacgaatgcccgcagctctcgatatagcggcacaggtccaggtatgaaagccaaacagtagccgtgttctcatttgggtgaacccctatatggtcctccctttccaaatccatatccagaacgatttccacaacattggcttcatcattaattaccccaagcggcgtcaccgacccttttttcagcttcagcatccgttccagccgttcttcagaggcaaagctcaggcgtacgacgccaagcttcgagccaagcgtttttaagtccacttgcttgtccccgcaaagcgttataaggaaatggcgtttcccctttgcgtcgcgcaaaaataaattcttagcaacatgtccggactgccctattcccagcttctccatttggccgatggtaaacaccgcctcgtgctccgttaccttgtacttgatagaaagctcttcgagccttttcattacagtttcccttgcagctgacatatctgtccctccgtatttctttctattatatataatgtataacagaaaaacagtttgcgcaagctttatgcccgatgcatgcagcgtattttaaagaatacggcggcgcccttgtgcaaacaatgaaaacggtgctatattaaaagcatacaaagaaaggagcagtgcttatgaaaataatcgtgaccgatacggaaaccataacggacggtgacctctcgctcgaaccaattgagcaattcggtgagcttatatgccgcgaccttacagtttatgacgagattgccgggcaggtgaaggatgctgatatgatcctatgcaacaaaacgccaatgaacgcgcaaacgcttgcaaaggcggagaacttaaagtacatcggcctgtttgccaccggctacaataacgtcgaccttacccactgcaaagagcgcggcatcacggtatgcaacgcgggaagctattcgacaagcgcggtggcacagcatacatttgcgctcattttagagcatttcagtaaagtcggcgaatacagcgcgttcgtcgaggacggcggctggacgcaaagcgcaaccttttctaaatttatatatccaacgcaggagctttacggaaaaacaatcgggcttgtcgggttcggcgcaatcgcgcaggcggccgcgcagattgcacttgcatttggaatgaacgttttaagctacacacgctcccccaaaacgcatgataacgtagggtttgtctcttttgaggagcttctggcaaaaagcgacgtcatttccgtccactgcccgctcaatgacgattccagaaatatgttcaacgccgaagcgtttgaaaaatgcaaagacggcgcatacttcgtaaacaccgcccgaggcgccattgtagacgaagaggcgctgcttcacgcgcttgaaagcggaaagctttccggcgctggcatagatgtactgcgcaaagagccgatgcgccccgactgcccgctgctgggcgcgccgaacatcaccataacgccccatatcgcctgggcccctatggaaacaaggcgccggctgctgaaaacagtactttccaacatccgcgcttttctggacgggacaccccagaacgtcgtaacgggatagctccgtttatcccagcgctgtactgaatatctttgtataggtaagcctgccgccgattctttcagacttcattaaatcaattgacataaccctttgggtaaccgtaccaaatgatttttgaaaagcccctctgtcaaaagcccgaagcggcacgacctccctgccaagcgtcaaatgcggcttgtattccctttgttcaattgcaaagcccctttcacggagcgcgtcggaaagcttttcctgcatctcttccagcgcggcgcacctatccacgcccagccagtataaatcttttcctcccctgccaaattttccgaggccttttatcctaagctcaaacggcaagccgcgcacctgctccatcgcttctttgacggcggcagcatccttagtttccccaataaaaacgagcgtcaggtgcaggttttccgggcgcgtaaagttacccgctgaggaagactctttcagcttttgtaccgcgcccatgagcgacgctttcgttttttcatcaaaattcacagcgataaacagacgcatgggaaatccctccggttaaatccagtatttctttggattatggcataccggcacaattcctgtcaatccccctagttgaagagcacaaaggatatttcctttgtgctcttctttattggaggccagttgtgttatcttattttatcccgcttcatacgcctgccagctgccggtgtatttaccaccgctgctgtttggcgccagaacaaataccatgttttcgttctcaggcgagaatgatatgttttctgtcgcgtgcgagccccagaaagaaaagtccagatcgcttctcagcatgaattccacctgctccttgggaaggtcgtaagagaagatgccgggctttccgtcaaccggattgagctttacaaagttttcaccgccaatccacatgcagatatacggttccgcccaatccgcagcgttggaaacgtcaaaatacacgcggtacgcgtctttttccggaagcggcggcagctcctgccactctccggtgtatttcccctcgcttccgcctggctttaacacgtataccatgttttcatttgccggtgtaaaggtaatattatctgtcgcgtgcgtaccccaatcgttgaactcgatgtcgcttctgagcaggaactccacctgctcctttggcaagtcataggaatataccccgggccttccggcaacaggctccatcttgacaaagttttgcccgccgatccacatgcagatatacgcttccggccattccgctgcggatgtgtcgaagtatatgcgataaaaatccttttccggctcggtaaagccaaccagccactggtatgcctgcgggaagtacttagaccaagcgctctcgctgtgcgtctgtgatttgtcgacgagtgaattgagctttgcttccggatagccgcattcaatcatcttatttttagtaaagtcgataaatggggtgatactgccttcaccgccggaaccgcccgcatacaggaagaacttcggcagattttctgtgtcagtaaaatcctgtgcggcaatcacgtctccaagcgtcttttcaccaaacagccagaaggaaggcgagaatactaaaatattcccaaatacctccgggtattcaaggccaatataatacgaaatcaaaccgcccatagagcttccgccgattgacgtgctctctttgcctgtacggacattgtaatggctgtcgatatatggcttcagcgtctctgcaataaacttcgcataaaggttgccggaaggattgtccgcggtactggaatccacattcggccaatccggcgtgtactcgttgattctgtcagaggcattgtcgataccgaccacaatcgagccttcgtagcccttggccatcatttctgctattgtttcgtcgaccttccattcgcccgcaaaagaggtaaaggaatcgaacacattttgtccgtcgtgcatataaagcacaggataaagcttatccttattttcagggtcgtagccatcgggaacccatacgcgtattgtacgctccctgccgtctgtatactgcggcataggcagggtaaaggtttcgagcgtcccgcctgtgacggaattctggcccgtttggtttttaaacatggcgaccgtgtcgttcaccgtattgccgccttcttccagggtaaacgtgcggttatcgatttcgccgccctcggcgccgccttctacacgcgcccacatgctgtcctgcccctcgacctggaccgtgtacttatactggacctccttgccgatatactgcttgtcggcaaattgcgtgagcgtataatgaagctcgtcaaccggcgtcatcacccaagcggggtcggcagggttccaatcgttgaaattcgttccaatgctgacctttgccccctccgggataggctcgggaatcgtcacgttgaatgtcatcgcaacctgctgtgcctgctgctcggcagggaacgtatcgattatacgcgccagatatttttgaatacacaaggcgtcctgcgtattgaggtcgccctcccctgttacatccgccgcttccctgtcaatcgcctccgcgccgattacttttgctaggtacttctggatacaaagcacatcggaaaggttgacgctgccgtttctgtcggcgtcgccgtacttcacatccgccgcgcctgcgctgagcgctgtaaagccaacgcttgcaagcagcatggcaagcgtgagaaggatactgacaattctcatccgcttcttatacataccaaacactccttttctgctgtttcggatacctggtccacccatccggaccgctgtgaaaagccgccggcttttaaattaggctttttcactaaaataattgtaccacttttaagaattaatggatataaatatactgacattccctgttaaattcctgattttcgtaaagaaaaagcatgcaaaatatccatttgcatgccatttcctgccgtttatttctgtttggtaagccttcggaattcgctcggtgttacaccaaaggcttctttgaacttgcttgtaaaataacttgttgaggaaaaaccaacctggaacgcggcctcctccacggtatcgccgccaagcagcaggcctttggatttatccagccgcagctgcgtaatgtattccacgagtgttttccctgtgtatttcttgaatacgcgcataaaataatactcgttataatgcacatggccggaaatggttttggccgttatatcgctgctgtaattgtgctcaatatattcgagcgcgtcgcggacggctgccgatactttaccggtgctgaggcttaccatgctataatggccgccgctcaggatttcataaaacagctgaagcagcagaaccttcgcacgcagctggtaaaagtcctcctttttatcacagcaatccgaaagctcaaaaaacgcgctctttatttcttcataccgcacctgccccggaaaaatcctgtcggaaacccgcagctgtctcaaaaccagaggctgcgctacaacgttttggcagaaatcatcctcacagccgtttaaaacacgcggcgagaatacaaaggatttaaagcgcagcagctctccgccgcttgtgatgtgatgcaccgtctccggctctataaaaataaaatcgcccgtgtggccttccacaacctcgccgctcatcctgacaaaaagcgtgccgcagatgacatagataatttccatttccttatgccaatgcatatagcaatccttatatacgcggttgttgcagtcgtaaaactccatcggcagttcaaacgtcccatgccgcttgatttctctttttttattgtctacatccatccagcccacctgctttatgcccgccgcccaatacgcggggctcattttaaatgccggaaagcatttcaagcaaatttgtgcccgccgccgttcgaaaaaacatttttcccgtttttttaccgcttcaacagaaagcttgtcctcaaatgaatcgacaggaaaatcagcctctacgagaatcctgtaatctaaatccgtctattttattataggtatgatggcgtcctgcaagatagctcaccttcctgtcagctgtgcgtcgcagccgggctttcgcggaagcttttccgcctgctgccgctgcttataaaacggaagtatcgattccgccgcagctctttaaaaaagctgcaatttgattcaaaatcacctgtacgccgcccttgctgtcgctttcaatgttgagcggcataatcgggtcgtgtacgctcaggcgcagtaaaaaccatccgtctccgttttctttatcgaaagaaacgcgcacgccttccctgctgtcctgcgcaacctgccatccggcatggccttttgcgtatgcttccaactccgcaagcgccgcgttcccgcaggccttaaagtcctgttccagaatttttatgcggatttctttgctctccgccggctctttgagcggcgcaatcaaatcctcaagccgcttcccctctttattaagctgcgccattttaataataattttggtgcacaggtaagcgccgtcgtcgagaaaataattttcccgcatagccgcgtggcccgacgtctcgattgccagcgggcagttgattccctgtgcgttcaggcgcagcgcctcgttgattacgtttttatagcctcttttaaagcggcagtgtacgccgccgagcgtgttttctatgaattccttcaaaccgctggaggtgatggaatcagtcacgaccgtacctccgccgtttccctccagggctatcgcggaagcgatggcgaccaggcggttacggttgatttccctgccgtccgctccaaccgccccgccgcggtcaacgtctgtgtcgaaaatcacgccgagatcggctttcgcgttcatgacagccctgcagaccgactgcattgcggcctcgtcctccgggtttgggacatggttagggaacatgccgtcaggctctaaaaactggctgccggaggtatccgcacccagcggccgcaatacgtctttcgcgtaaaaaccgcccgcgccgttgccagcgtccacaacaatatgaaacccctttaacggcttattataatcagcggcgttaacctctttacaaatcatatcgcgcaggcgctttgcgtagtccttcatgtaatcgacggcctctatttttccgccctctttcggctggggcgtctcaccgcgctgcgcataatttaaaatttcttcaatatcgcttccctccaggccgccctgcggtacaaaaaatttcaggccgttgcggttgaagggatggtggctcgccgtaatctgcaccgcgccgtcacaggaaaggtctattgtcgtcataaacatggacggcgtcgacgcaagcccgcagtcgagcacatgcgcgcccgcttcttttaacgtattggttaccacgccgataatacgcgggccggaaatgcgtgaatccctgccgcaggcaattttaagctcccccggctttttccccgctttcatgcaaagccaaatcaaaaaaccatttgccattgcggcaaccgcttcgtccgtcaggttgatatcctgtccctctacacccccgcttgctacaccgcggatatcggttccgcttttaaattgtttccaatattcattgagcatttaaagcacatccttttttacaatctcgacaccgtcattatacacgggtacaggcaaaatgtcgaacaaattttaccgcattctttttttcttcttgtgcgctttcttttcatattagatatgaccgcgggtaaaataaaaaaagaggaaaaggagcgattggcgtgccgcatttgattgagcttgagcatatcagtaaaatatacgggtcgggcagcagccgtatcagggcgctcgacgacgtaagcctgaaaatcaacgaaggagagctgattgcgattgtagggcagtccggttctggtaaatcgaccttaatgaatatactgggctgtctcgataccccggaggagggcagctattatttaaaagggaaagatgttgcgcagatgagggagcgcgagctgtccgacgtgcgcaaccagcagattgggtttgtgttccaaagcttcaacctgattccaacacttaccgcgctggaaaatgtggagctgccgctttcttaccgcggcattcgtaaaaaggaacgccacaatttggcttacgacgcgctttgctgcgtaggcctggaaaagcggattgaccacaggccgtcgcagctatcagggggacagcagcagcgtgtcgccattgcaagggccattgcggccagccccccaattattttagctgacgaaccaactggtaatttagatactaattcgggaaatgacataattgatatactttttcacttgcataaaaagggaaaaactgttatactaatcacgcatgatacgaatctcgccggtttagtggagagaaatatatgtatttgtgacggaaaaaccgtttaaaattccttttcgtaaatatgtacttcaaatttcggcataacatatgaatacgggaaagcaaaaatcagtgaaaagtgcacatttaacaaatagaggtatgaatctttatacaaaacaacaaaagaatcgacctgtttgttgcatattcacaattaaattcatatgtttcgtacaccttgaacagacattaggtcatttgtcacaaaataagtttttgatttttgttgacattcccaaaaactctgctataatagaatcagcaggtaaaaagtacctgccacatatccgaaatgagaagtaaaatcaaagtaggcacgcgaaaatttcatattttatgaaggaggaatttctatgacaccgattcttgaattgcatgacatcgatgtacccgcattcctcgccgtgcttgacacctgcgagggaaacgtcttcctcgtcacacgcgagggcgaccacttaaacttgaaaagtaagctttgccagctggtaggtttgacccagctgattgaaggcggaaaaatcgccgaagcttatatcgtctgcgaaaacaaagacgatgaacgcaaactgttccgtttcaacttgcttggagataccggcgacgcgaaagtataaggaacactaaaattgattacacctacacatttgttttaccattatttcaagaaatcctaaaacaggaatcgccgttctttaccggaacggcgatttctgtttgcctgtttcttttttgcttgaaaaacaggcggatttgttgtattctattatctgcgcaatgcgcggtctgtcgcaacatccagaccttaaacaaaactacggaggaattcatatgacgaaaaacaaaggcacgatatatctcgtgcagggcgccgtgattgcggcgctttatgtggtgcttacctatgcccaggagctgctgctccctggtacgacctcgatggcggtccagtttcgcgcgtctgaggtacttacgatgcttgcgcttttcactcccgccgctgtacctggacttacagccgggtgcgtgcttgccaatattgtaagcttgggcgccctgccggtcgatatggttttcggctctgccgctacgctcttggcggtgctttgtatgtaccggcttcgcaacgtgcgggtaaagggcctgccgcttctcgcggcgctgatgcccgcgctctttaatggcgtaatcatcgggcttgaaattgagtttttctttattgaagggccgttccatttcggcagctttctgattcagggcgggcttgtcgctttgggtgagcttggcgtctgcgttgtactcgggctgcctctcgttcttgttctggagcggacgaagctggtaaaaaggctgttccagccgaagcactgattatttttaacttatcttttccggccgatgttgcggtttgccggagactgccgcgccgcaggggattttcctctgcggcgcggacttttttttgaaacgcaacacttcaaaaaagagatagatttcaagcaataaagtgttcgatgcacgaaagcctcaaaaaaacaaggcggcatccaaaaggataccgcctgtaaaagcatattgccaaaagaatcaaacgcaaaaatcagccgttgatcttcgtaacaacgccggagcctaccgtacggccgccttcacggatagcgaagcggaggccttcctcgatagcaatcggggtgataagctctacgtccatgtcgacgttatcgccaggcatgcacatctctgttccctcgggaagggagataacgcctgtaacgtctgtcgttctgaaatagaactgcggacggtagttgttgaagaacggtgtatgacggccgccctcttccttggtcagaacataaacctggccgcggaactttgtgtgcgggttaatggaaccgggcttggaaagaacctggcctctttcgatttcagttctctgaacgccacggagcagaacgccgatgttgtcgccggcctcagcatagtccagaatctttctgaacatctcaatgcctgtaacaacgaccttccttctctcgtctgtcagaccaacaatttcaacttcctcagaagtcttcagctggcctctctcaactctgccggtagcaaccgtaccgcggcctgtaattgtgaagacgtcttcaacaggcataaggaacggaaggtcagccttacggtcaggagtcgggataaagctgtcaacagcgtccataagctcatggatgcacttgtattcgggagcgttcgggtccttggaagcggaatcgagcgcaacgaatgcagaaccgcggataatcggcgtgtcgtcgcccgggaaatcatactcgtcgagcagctcgcggatttccatctctacgaggtcgagaagctcttcgtcgtcaacctggtcggtcttgttcatgaagacgacaatatacggaacgccaacctgacgggaaagcaggatgtgctctctggtctgcggcatcgggccgtcagcggcggaaacaacaaggattgctccgtccatctgtgcagcacctgtaatcatgttcttaacatagtcggcatggcccgggcagtcaacgtgcgcatagtggcggttttctgtctcgtactcaacgtgagccgtgttgattgtaataccacgctctctctcttcaggagccttatcgatatttgcgtaatcgacaaagtcagcgtcgccctcaaggttcagaaccttggtgatagcagctgtaagagttgttttaccatggtcaacgtggccgatggtgccaatattaatatgcggtttgtttctttcgaatttttcttttgccattggaatttcctccctttgatatgaaaataaaaaagttttcagttcttaagctatattctagcaattttgttcctaaattgcaataggaaaaacaaaaaagaaaatcgccttagaatcagtcttccttcttgctgcgcgaggtgataatcgcttccgaaacggacttcggaacctcggcgtaatggctgggctccataacgtactgtccgcgtccctgcgtcttagaacgcatgtcggtcgcataaccgaacatctcggaaagcggtacatgcgcgttgattctctgcgcgccgttctccgcctccatgccctggatcatgccgcgcctggaattgaggtcgcccataacgtcgcccatgtactcttccggtacgatgaccgttaccttcatgataggctcgagcagcacggggcttgccttctgcattgcctctttgaacgccatagaaccggcaatcttaaaggccatttcagaggagtcgacctcatggtaggaaccatcgtaaagcgttacctttacgtcaacgacattgtagcccgcgagtacaccggaaagcattgcgccctggataccctggtcgaccgccggaatatattccttcggaacggcgccgccgacaatggcgttgacaaactcgtaaccctttgtcgggttcggctcaatcctaatcttaacatggccgtactggcccttaccgccggactgccttgcgtatttcttgtcgacgtcggcattgccgcggattgtctctttgtatgcaacctgcggtttaccgatgtttgcctcaaccttgaattcgcgcagaaggcggtcgacgatgatttccagatggagctcgcccatgccggcgataatcgtctggcctgtttcctcgtcggtatatgccttgaacgtcgggtcttcctctgcaagctttgcaagcgcaatacccatcttttcctgaccggctttggtcttgggctcgatggctacacggataacaggctccgggaattccatggactcaaggataaccgggtgcttttcgtcgcagagcgtgtcgcccgtggtcgtgttcttaaggccgaccgcagcggcgatatcgcccgcgtagcacgcctcgatatcctttctgtcgtttgcgtgcatctgaaggatacgtccgatgcgctcgttgttgtccttcgtagagttatagattgtggagccggccttgacaacgccggaatacacgcggaagaagcagagcttaccaacgaacgggtcagtcgcaatcttgaacgccagcgccgagaacggctcatcgtcagacgcgtgcctgcaaagttcttcctctgtatccggattgactcccttgattgcgggaatatccgtcggagcgggcatgtaatccacaatcgcgtcgagcagcttctgtacgcccttgttgcggtaagaggttccgcaggttacgggaaccatcgtgttggcaattgtgctcttgcgtatctgcgttttaatttcatcaatggtgagttcctcgccactgaagtatttttccatcagcgcctcgtcctgctcggcaaccttttcaatgagctcgtcgtggtacttctgcgcaagctccatcatatcctcaggaatcggctcgtctctcatatccttgccaaggtcgtcataatagacctccgccttcatttctacgagatcgatgatacccttgaaggtgtcctcgctgccaataggcagctgaatcgggacggcattgcatttgagcctgtccttcatcatctggacgaccctatagaagtccgcgcccatgatgtccatcttattgacgtacaccattctcgggaccccatagttgtcggcctggcgccaaactgtttctgactggggctcaacgccgccttttgcgcacatgaccgttacagaaccatcgagaacgcgcagggaacgttcaacctcgactgtgaagtcaacgtgtcccggggtgtcgatgatattaatcctgtgctctctccaaaaacaggtcgtggcggcagaggtaattgtaatacctctttcctgctcctgcaccatccagtccatcgttgcggcgccgtcatgcgtctcgccgattttatggctgatgcccgtatagaacaggatacgctctgtcgtcgttgttttaccggcgtcgatgtgagccatgatgccgatatttctagttttctcaagagaaacctgccttgacataaaatcctcctattaccatctgtaatgcgcgaaagccttgttggcctctgccatcttatgcgtatcgtcacgcttcttggcagcgccgccggcgccgttaatagcgtcgaggatttcaccggcaagtctttccttcattgtcttttcactgcgctgtctcgaatatgtggagagccagcgaagacctaatgtctgtcttctttccgggcgaacctccatcggtacctggtatgtggcgccgcctacacggcgggcctttacctccagcacaggcataaggttttccatgcactgctcaaagacctcaagcgggtctttgcctgtcttgtcacggatgatatcgaacgcaccgtagacgattttctgggaaacaccctttttaccgtcatacatgatattgttgatcaagcgtgtgacaagctttgaattgtaaaccggatcgggcaaaacatcacgttttgcaattgagcctcttcttggcactttacttccctccttcacaaagatgagatatcataggtactcgaaagcgacaaactcccgtgggccaatacaaaaggcttttcattatatataagcaaagcacatctgtattgtactggtatttttcaaaaattaccttgttccacttttggtgcctgtcaatcccttatttccctgccttcgggcgcttagcgccatacttggaacgggcctgcatgcgttttgcaacgccctgcgcgtcaagtgttcctctgatgatatggtaacgtacaccagggagatccttaactctaccgcctctgataaggacgacggagtgctcctgcaggttgtggcctacgccgggaatataggaactgacttcgattccgttggaaagcctgactctcgcaatttttctgagcgcggaattcggcttcttcggggttgctgtcttaacagcggtgcagacgcctcttttctggggagaactctggtcaatcgctctgcgcttcttagagttccagccctttaaaagagcaggcgccttcgccttcttttcagatacctcacgtcccttgcggaccaactggttaaaggtaggcatatgcttcctcctttcaaaaattttttatgttgaacaaggccatattattataacctcgttaacagcaaaacattccattatcggtaataaacagaaaaaacgggcatttctgcctgttttgcgacaaaagaaccacgtgaaaacgcgcaaaacaccattactcggcaatttagaatcataccacaagcaacggtgctttgtcaatgtttttattcgattgtcatgcggattttctatgttttatccggtattgccagccgttatccggcggcaaccgcctgttggattaaattgacatcattcatatttacctgcccgtcattgtccatatcgcccaggaacctctgcgccgcgtcaaaggtcacaagcttgcttacatatttttgtgcaagcagggcgtcggcagttgaaaccgtcccgtcccggttaacgtctccccggatataaccgaccggctcaaaataccactggaaccgctccggaattcctatattctgccagattgccgcgctgctttgcgcgctggtatcgagcgcggtcaggctgcgcgaattcgacgcgggcagcccgtagagctggataccatatgtattgtcaatactgctgccgccgaaggttatatactgcgcgctgtcctgactgacccatgcgttcgtttgcccgcttatggaaaggcagccggggtaggcgcttgaatttgtctggatagtaaaggggtcgtacccagttttactggatacccactgctggtttgcctctcccgtaaaggcctcctgggaaatctgccccgtttcctcatcgaccgtcaaatatgcgccgtttgcgtttgatttaccgcgtatgtaaaaaataccatccggatagcccgtacccgtcaggttttcgcggaacgccatgttgtcggtacaccacgcgtagccgtagcgcacggtttctagatttgtagaatcttctttgctgactctaatttgataacgagattcgttcgaagaaagcgggaagtacgccatctcggttgagctgttcgcgttggctgatgagccgacaagcgagccgtttctgtagacacttaaatcgaggtcgtgctgcgtaccggcaacaacagttccgctcgcgtgattgcttgacgaaatcgaattttcccgtagccacgcaacgctcacattcatatggcttgcgccataggtcggctggacaaagttgcgcttttccgtagcagacgtcacctcgccgtacccgtaatttccttgtgacactatgcatacggcgttccacgcgtccacagctcccgcgccctgccgttccgttaggccctgttccatcgtttccgccgccgcacctgccggtgactgtaccttacgttggcaggaggccattaaaattgcctttaaagtctgcggctggtagctgagggagggcttcaattccaagagaagtgcaacgattccagtagtatgtgccgtcgcattacaagttcctccgccaggaagattttttggcgaaataatgtcaggtttttgacaacctccaacacttacaaatgaaccatcgggataaaaagagtcatccacatgcgtacttgtctcatggtcgtcatacccacctactgtaataacattgtaggcaagtccaggatcaccaatatcactttttggtccactattgcctgcaggaattaaaaaatccacgttgtgttgtacagctaaatgatccatccacttttctctggaagtatacatatttccatttctgctccaatttaaacacatattaacaatactaacaccttcagttagtaaaagttctatgttgttatacaagctcctccagtcagtgcaatataattttgcatttggagcaacaccacttgcacccgcaatagtgatggccatacgggttgcatgactatcaataatatttgcattaatatttgtaatattctgagaattcaattcagtgctactttcaggaattccaccatcaagaattcctattttaacaccatctccaagaagtcctattttgtttcgaatttttgtaacaccactaccatcaagtactgaggtttctgacggaaacatcggagtttcgttgctaaataattcaactaattcaattttgctatttttacaaatctgcagaatttgctgtcttgtcatagtggtaattatagcaggtgcatacttgctgataaaatttatatcatcgttctgaatcatagtcgtcttaatgacactagtactttcagcaatatatttatttcttgaaactttgcgccttgtttttaaatattcgtttgtacgctgtacttcaagttttctacctaccgaagtattctgcaaatatttatccatttgattttactatttgttttttcttgctttaaagcttcaattaaggagtgtgacggcatctcaaaatctaccgaaatattttcttctgtcaaccccgtttgttcctctacttccctgtccacctgtttctgatcgatatccttgtaccatacccataccggtattttttcttttgataagtctttcccctctgcttccagccgggcaaattcctgatacagctcttctgaaattttatcttccggcgcaaccgcttcctctttttccgccgcgtatattcctaccggaataccgcatatcaacaaagacagcaaaacagaaatcatccttttcatttttctatcccctcacgcttttatttacaaaatttttgcgattttcttttgtatatctaaaacatcacaaacattaatatctccatcattattatagtcataaaaaacaaacgtaaactcgtctgcagctatcagcttagcaattattttttgtacatttagaacatcctttacagtaacgtcaccatccatatcagtatcaccaggagaataaactcttatagaagaaatctgctcaagaatcgtattaataatagtatcattcagaatgatttctcccgttctattcgcatcatttagagttaatatttctccatttttttcagcatagattcctaatttataaggatgctcccatgaggaattcaccagtatgtaatttctaactcgatccgaaacacatgttggatgcagccatcccggtgtgccataaaacacataccaattattggttactgtaatcaattgcacttcggaggtttcttcttcttcaaatttgtgagccaccccctgctcatccaaatacgcaataaatttttgttgcagtgcctccatatccggctgtaccgattcttcggcgcctgccgcgaccgtcccaaccgaggcaagcagcaaagccgccagcatgatacacagcaatttttttatctttttcataaccaagcccctctttcgtcgttttataaaataatatttatggtcggtttggaaatcttatccaatctgcattcttattatagcaaaaaattaaatttttgtaaaataaaaataccctgattattaaaaaacagggtacaaaaattgtattaattttctatatattttttgcttttatataaaacagaaatgtaacacgttttttggttcttatgctttttataaaaaccgcttatatggaatactcaatcagtgactttcgctatccttttctgcatatcaagcgcatcttttatgctaacttccccattcccgtcaaaatcgtaaaaaggaaacgaaaactcctcctgtgaaacgtctaaatattttgcaattgctttttgcacctctattacgtcgcttacagtgatttctccatctttattgatatctccggataaataaacagacatactagccgcgccaacgttgtccacaacccgcgttatatcgatttcccccgtattgtacgcctctttcagtgttaacactttcccatctttttccgcataaagcccaatcttataaggtgtttcccaagactggcttacaaaaacatactctcctatccaatcgtttgtaaacatatcccctgaccagccgggtgttccataaaaaactgtccagtcatttgcttttgtaataaactttatgccggaggaatcctccccgccgaattcatgtgttaccccctgcttatccaaatatgcaataaatttttgttgcagcgcctccatatccggctgtaccggttctttggcgcctgccacgacagtcccgactgaggcaagcagaaaagccgctagcatgatacacagcaatttttttatctttttcataaccaagcccctttttcgttattttataagatttatttacgtacaaaattaaaattttatttaatatatattattatatcatgcggataaatttttgcaaataaaaataccctgtattttaacagggtattagatgatataggcagcgcaaatctcagcctatttcgatattatacaggcttttttctttactgctcattaggaagataagtgtccagcccctgctcctccagcatggcgaacagctcgtcccggaacgcgttgtactggtcaagcgcttcctgctgccgcgtaaggaaggaatagggctccagctccttcatcttcatagaatacaacgtttcctcgtccattgccttttcctgcttttctaccgataaattatacatgccaaatcccgattcaaaaagcagaatatactgtttttccaacccgccgtcgagcctgcggtcctcatggaagggcagcttctgtaaaagcagcaggtaggtgtccccttcaaataccggcaatacaccaaaaagagaactgatactgcgttcttcaaaccaaacggaggcaacatttactagggtaatttcagtcccctttaagctttcggagccttttaatacctccaaaaccttcatatcctgatacatcgcctcgtctgtcatctgccgcttcccggtaaaggtacagagcaccgcagcgtcgcagcgcgcaagcaggtcgtcagccgagtgtatcccctgcgttttgttattttcatcatttaaaaaatttgcatcaatatttcccgcataattaaaatccaaatactccgtcccaatatcccggtaagaaaaccgggtacacagcgcgataacaacgcccgcaagcaccagcgcggcgggaatcaaataagcccttgccctcataccgttccccccatgccttctttgaactgcgtgttctcctccagccggccggcgtccatttcaaaaaaacggtcgcaaaggacgcaaaggtcctcccggttatggcttgcaatcaataccgtcgcgccccgttgccgctcctccaggatgatattccgcaccagctcaacgccctttgcgtcgagcgcgtttgtcggctcgtccagcaaaagcaggcgcggacgctccataacagcctgcgcgaccgcaaggcgctgcttcatgcccagcgaatactttccgtatttctttttatcctctgggtcaaggcccacgcgcgcaatggcctccttgatttctttatcgctgattttcctgcggatagacgcgagcgcctttaaattttcaaagccggtgtaatagctccacatccctaccgactcaatcataatgcccatatcagcgggaaaggatatttcgtcccccacccgttttccccatacgcttacaaagccggaggtcggcttgataatgcccgcgaccgcacggaagagcatggtttttcccgagccgttatgcccatagaagccatagattccctgttcctccagctttaaatcgatatggtcgagcacggtgttgttcttgatgattttggttatatcattgatttcaatcgctgccatcttcagccctccgttacgatttcaattaagtcatgccggttgatgtaaaaacgcgcccacaggtataacgccaggctataaagcgccaatagaacaatggataccgctacgctgctctgacccggggcgtataaaaaataaggccggcaggcctccggcgccggaacaccgccgtgccagaaatacatcgactgcgttacaggcagcagcatagcaaaaaaggcctgttccctaaaaaacaccgcaaacgccagcagcagcaaataaccggccgccaccgctaaaaacgctttggcggtgtcccatttcagggaaaggaggtttatcagcagcgcaaagaaaaaaacgcccagtacattgagtatgtataaatacaaaaccggcagccatgctgtaccgcctgccggcaggcggtagccgtatgccatagaaaaagcaaacgttcccgcaaacagcgccagataaaggattgcggtgcgcgcaagcagggagaatacctgttgattgagccaggcagcttttgtccccagcctggtaaaaacataggtatagctgataacaaaatcgcgccgcatctggccgctgagcagataaagcaccagcagcagcggcagaagccccaaaaacaaggccatcgggtcttcaaacgcgtcaatccttaccccggaaaataccatcacaaagcaggcggcggcgtcattgtcccacatctgcggcacagaacagttcctgtaaagaagcaggccgtacaacagcaaggccagaataagctgccctgccccggaaacatattttttataacgcatgtgccccctccttacctctgttttttcagccagtcgtatctttccagaagaattgccttgaggatggagatgacaacagcggagccggctgccaaaacaaacggcgcaagccccggcaaatcgtccggcgcgctggggtaaaggtgcagcagctccggaatataaaggggcggggccgggagcataacgaccgttgcgtattcatatacagccggaagataggcaagaaaaaaggccagagcgtcgttttttaaaagcagccgcagcaaaaaagacagctccgcgtaggagtagagcaccagtgtctgcaaaaccgcgctgcaaagaaagaaacgcccataggaacaaaagcccgcaagctctcccgcgcaggcgctgcggataaacagcagaaaatacaggtacagcacaaagcccaggcagaaaagcaggctcataaagctgtggcgcacagtcaggcgggaaacagaggactgccgcagcaccacggacaaattgccgtaaaatccatgcacctgctggataaagacaaaaaacagcgggatgacgataaacgtttccgcaaaaacagaaaaaaagcccgtataattgataagcgtgtacagcgtttcatcgccattggccgtcatatccaaaagcccgggaacaaaaagccccgcagccgcataaagcagcagcgcgataacgggcaggtaaaagaagggggatttataaaaaaagcgcaaacggcgtcaccctccctcacagctcatcccgtttcagcagcttcgcggctactaaaagcacatcggccgcgagtacggttccgaacaggataaaaatatcgctcaaataaatatccccgctgcccgacggcggcatgataatcatgtacggcatcgcgccgatacggcgggagagtattccaatcaaaaaggaacccgctatgtaaaggattccggggatggtcaccaccagaaagcggttcttatggaaaaaaagggaaatcccgtaccccagcacagtcagcagcccggaaaaggcggcgggaatcagcgtgtaaataaagtaataaaggtacggcgaattcatcgcgagacctctgccaaacgtttccaacatatgatgatagtcatgggttggccattggggcaaaatcttgagggaatcgagcggcaccgcaaggcacacgagcagctcgcttatgagcagcgggataaaaatcacgagaaagcccgcaaaaaacgccgcggccgcgccggacaaaaaatagctgctcctgcttttccttgccaagagcaggggcagcaggttcgacttccggtgcgcgtaatagctccatccgtacgcgacaggccctgcgaacgggaaaataaaaatgataaacggtccgagcgccatctttaagatgctgtcgtatgcggtttcctcataaccgaaataatacgaagcgggccccaaagaagcgctgtaatcaccgtacagctggagaagctctcccaccgtcgcaatcaccataaacgctgtgcaaaaggcaaaggccaggaaaaaatccttcgaccgcagcatatttttccaatgtgtcgcccacatttcctttccctccttgttggtttttcatatacgtgttccccggcaatgccggggaacacagccattatgccggaggccgtctcctaagctagcgggattatgggaactttacctgcccctttgcagctttacaatcccaagaaacccagcgattgttaccgccgaacagcgtgacggtgcttccctttgtgcctggatctaaagcgagattatagaagccgtatcctttgtaaataacactcgaactacatagttgtttagtcccttgcttaaataaagcgtaaatctcttgatcgcccatatcggaaacactgtcaagcttaacctcaccattcctgcctccggcatgggttccgttgatgatatttacgccgttacgggcgctgggcaaataggttgtccatgattttgcagcttgcagcgaggatacggacgcggcgcacgccgcaaccgtaatccccgcgagcagcagggaaactaatcgtttgcttttttttatattcatcacctcgttaataaaatttcactattatatcagcctcagacacaatttttttatttacaattaaatgatacattatatttttatatgtgtcaacggaatttatattttatttttataaaaatagattattttgattttttattgcaatccatcaataaaaagaacggaaggtatgcaaaccgcctgttttttagcggtatgtcacggcaacacaacaagacatgttccagaaaaaataaaacaaaaaggaggggatgaatgtcccctccttgcaacgagcatttttattcaaaaaaacagctttttcaagtcctccaggttatacggcgtttgctgatagacatagtagttgagccagtttgtatagagcaaagacgcgtggccgcgccagttcatcggcggggtcgcggacgggtcgtcatttggaaaataattatacggcacctgcgggctgccccccttcttctcgtcgcggaaatattccgtcgcaagggtgttcctgtcgtattccgcatggcctaaaacaaaaaactgcctgccgtccttgttgcatattacggccacgcccgccattctggaggttgccagcacctcaagctcatcgtgctgctcaatgtcctcgcgccaaacgcccgtatagcgtgaatgcggcatggtaaaccggtcgtcgaagccgcgcatgagcggatggctcgggtttaaaaccctatggctgtatattccgctgagcttttcccccagctcgcgtttcggaatcccgaaatgataataaagccccgcctgcgcgccccagcagatgtggaacgtggaatagacgttctttttcccccattccataatagagcacagctcttcccaatagtcgacctgctcaaaatcgagcagctccaccggcgctccggtgataatcatgccgtcgtaccggttatccttgatttcgtcaaacgttttatagaatgtcgtgagatggcgctgcgacgtgtttttcgatacgtggcttgccatctgcaaaagctctatgtccacctgaagcgggctgtttccgagcagccgtagaagctgcgtctcggtttccaccttggtgggcattaaatttacaattacaattttcagggggcggatatcttgtgtcatcgcccgctggtccgacataacaaaaatgttctccgattctaaaatcttgcttgcgggcaaatcgtccttaatcctgataggcatccgcgccacccctttcctttatatataagtatacgcgcaatcccgcgtatttttatcaatacgccttgccccaatagagcatacattttgcgggctttccgcagcaaacgcaggtatcggacagatgctcctgttcaaacgggatacagcgcgagcctacgcccgttttttcttttaccatgtcctcacacgcctcgtcgccgcaccacattgctttaatgaaaccgtcgcccttttcctcaagtgttttcgtaatctcttccatcgaggtacacgcgaatgtcttgttttccctgttttcaagcgccttttgatagataccgccgtgcacctctctgagctttgcctcgaccgccgtttccagcccgtcgagcgatacgacagtcttttcacggttgtggcgcgttacgagtacacactggttgttttcaatatcccgcggaccaagctctatgcgcaccggcacgcccttcatctcgtattccgaaaatttccaccccgggctgttgtcgctgtcgtccacctttacgcgcacagatttttcaagcctttccttgagctccgccgccttttcaagcacgccgcccttatgctgggcaatcgggataatgaccgcctggatgggggcgaccgccggcggaagcaccagtccgctgtcgtcgccgtgcgtcatgatgacggcgccgataagccgtgtcgtcacgccccaggaagtctggaacggatgcacctgcttattctctttgtctgtataggtaatatcgaacgcctttgcaaagccgtcgccaaaataatgggacgtacccgcctgcagcgctttgccgtcgtgcatgagcgcttcaatagcataggtcgcctccgcgcccgcgaacttgtcgctgtctgtctttcttcccttgaccaccggcatacaaagcgaattttcacagaaatccgcgtaaacgttcagcatacgctccgtctcttccaccgcttcttctgaggtcgcgtgtatggtgtggccctcctgccagaggaattccctgctgcgcaggaacggacgcgtcgttttttcccagcgcacaacgctgacccactggttatagagcttgggcaaatcgcgccagctttgaataatattcgcgtaatgctcgcaaaaaagcgtctcggaggtcgggcgcacgcaaagccggtcctcaagcttttcgtcgccgccgtaagtgacccaggccacctccggcgcaaagccctcaacatggtctttttccttttggagaaggctttcgggaatgaacatcggcatgcagacattttcatggcctgtcgccttaaacataccgtcgaggatacgctggatgttctcccatatcgcatagccgtacgggcgaatcaccatgcagccctttacgctcgtatattcaatcaactccgctttttttacaatgtccgtataccatttggcaaaatcctcgtccatcggggtaattgcctcaaccaatttcttatccgccatattgtacgcgccctttccctgtaacatttttcagaaaacgccataatatttgtattataccgaaaacgccctgctttttcaatatctaaattgcgcgcagggaggaacgcgccctgtcaaaacgggcattttacgatgttcgttacaataccggcttctgttatgtcgaggattccgtaggtcgcgtacgctccgcgcaggctgcccgggttcatgacgtacagcccgtcgtcgtagtcggtcattgcgttatgcgtgtgtccaaacagcaggatatcagctttttgctcccttgcggccatatatacgctgtagtaccccatttttacgttatacaggtggccgtgggtcgcaaatatcttctttccggcgatatggagcgtctgcactgccggtaaatccgagccccagtcaccgttgccgcgcaggcgcacaatcattttttccggaaagtcggtcacgagctgcatcgactgctgttccccgtccccaaggtgaataacaatctcagctttcggctgtgccgtcacaacccgctgcagggtaaaatagtctccgtgtgtatctgaaacgacaagaatcctcataattgttctcctttgaaagtataaataaaaaatggccggcataagtatatgctgtagccttactttttgaacaggtggtgtttttatgccaaacaaagacagcaacgaaaacctgcaggaccttatcaatactgcgtcacagcggctcggcacgacgccggagaatttaaagaaggcaagccagcagggaaacgtgcagaatcttttaaaccagctcgacggcgagcaggccaaaaaggtgcagcaaattttaaacgacaaggaagcctcccagaagcttctgaacacgccccaggcgcaggccctcctgaaaaaactgatgggcggcaaataaaactttttcagctgacggtgccggatgaatgcgggaaccgccgaaggagtgtgacagaatggacgatttgacagataaaatcacaaagatgctgagcgacccggaaactatggagcaaatcaaagggcttgccggaatgctcggccaaaacgacgcggcgcaggaaccctctggagcccttcccgcggccgcttccaacggacaggacggctccgcggaaagcagcaagggcggcgggttcgacctgtccgccctgtccggcctcctgtcgaataccgcggatgggaaaaagggcggcgggccagatttgtccgccctgtccggcctcctgtcgaataccgcggacggaaaaaagggcggcgggcctgacctctcagcgctgtccggccttttatcaggcgtctccggaggaaaaaagagcggtggattgccgggggcgggcgatcttctttccggactttccggcgacacgatacaatcgattatgcggattctccccatgctcagcgaggtaaacaaagaggacgataccacgcgcctgctcaatgccctgcgcccatttttagggtctgaccggcgtaaaaagctcgacgaatccgcgaaaatgctacatatgatgaagctgctccccctgctcaagggattgcagctttagaggtgattggtgtgagagagcagtctggcgatatggaccgaatccagcaggacgccatgcggcgtatgcaggagatgcaggcgcgggcgaaaatccagcagccgcacgcgcagcagcaaaatacacagcagggaaatatggggcacaacccccacaaacctcaagcgccgcagagaagcgcgccgcacggcgctccccctccacaaagagaaactcccccggcaaaaatgccggaggaaaaaaagcccatagcttctcccgcgcataacgacctgctcggcagcctttttgaggacaaagaacgcagcctgattttaatcctgatacttatcctgtcgagcgaaaaggcggacagcagccttatccttgcgctgatgtacctgattatttaggtcagcggatttgcccgtcgcccttgatgatatacttcatagaggtcagctcattgaggcccatcggcccccttgcgtgcagcttctgggttgaaataccaatttcagcacccaggccgaatactccgccgtctgtaaagcgcgtagaggaatttacataaacggcggcgctgtctacgcgcgacgtaaactcacgggaagcgcggtaatcgcttgtaacgatacactcgctgtgcccgcttgaatatttcgcgatgtggtcgattgcctcgtccatactgtctactacttttactgcaaggataaaatcgaggtattccttgtaccagtcttcctccacggcgggaacgacgctgtccccgagaatttttcccgtcctttcacagccgcgcagctccacctgcttttcatcgagccttgccttaatcttgggcagggctttttccgctatatctttgtggaccaggatggtttcaattgcgttgcacacggagggtcgtgaggttttcgcgttataaataatatctgccgccatgctgggctcggccgatttatctacatatacatggcagttgcctactcccgtttcaatcacgggtacatgcgcgttttcaacgaccgcctttatcaggcccgcgccgcctctcggaatcagcacatcaaggtagtccgtaagccccatcaattcaacagacgactggcgggccgtgtcctggacaagctggatgcagtcctcgggaagccccgcttcctttaccgctgcgcgcatcacctgtgcgatacgccggttggaattgatggcctccttgcctccgcgcagaatcacggcattgccggatttcaggcaaagcgcggcggcgtccgccgttacgtttggacgcgcctcaaaaataataccgataacgcccagcggtacgcgtacctttgttacctccaggccgtttttcagcgtactgccgcttaaaaccgttccaatcgggtcgggaagggctgctacctccagcacgccgtttgccatgccctcaacgcgttcaggcgtcaaacggagcctgtcgagcagcgccgccgtaagtcccgctgccttaccgttttcaatatccttatcattttcctcacgaatgcttttgctgttttccattaaagcagcggcaattttctgcaatgcaaggttctttttctctcccgctatgctcaaaacacgcgcggcttcctttgcgttttgccccatctgttccagaaccgtcatatctatcttcctttccaatggttttatttctgtgccaaaaacctggtgccgaccggcttctcttccagaagcttatacaggttttccgggtcttctccgtttattacgcagcactcaataccagcggctgtcgcaaactgtgccgcaagcagctttgtccgcatgccgcccgttccacggttggagccggttccctcagccatccgctcaatcgtatcgtcaatccgctccaccagcgggataagctttgcgtccggatttgtttttgggtttttatcgaacaggccgtcaatatcggtcaggataacgagcctgtctgcagagataatatccgccacgattgcggatagcatgtcattgtcgccaaaattttcaccgtccagctcgtcgatggcgacggtgtcgttttcattgacaatcgggataatccccatttccaaaagcgtgtggaaagtgttgatgacgttttcctttgtatggtcattttccacagtattcctcgtcaggagaacctgcgccaccgtatggttgtactcgccgaaaaatttatcgtacatgaacatcagctcacactgcccgacagccgcgagcgcctgttttttccgcgtctccgtgggacgcgccttgagccccagcttgccgatgccgacgccaatcgcgccagagcttacgagcacgacgtcacagccggaattctgcaggttgcacaataccttgcagagctgttcaagcctgcgcaggttgagcctgccgctttcatatgtaagggtcgaggtgccgaccttcactactattttatgacaagtcatagaataaccttctcccacagtcaataaatttattgcttttcctgcgtatccagcccgtcgagcagctcaaacagcttgtcggtatcaatcggcttaatcaggtagccgtcgattcccgccagatatgcctgctccttatcctcatcaaaggcgttggcggacatcgcgatgacaggcgtttttatttttcttccggtttcaatcatacggatttccctagttgcgtccagtccatccataatgggcatacggatatccattaaaaccgcgtgatagtatccttccggcatagcggcataccgctcaacggcttttaggccgttctccgccgtatcgaccagcacgtcctggaactccagcagggattttgcaatttccatattcaattcgttgtcctccactaagagaacacgcctgccctttatatgatatgtccttttcgcttggtgtgctcccgttatattcaggcggagcattgcgtcgtaaatcgcagactggaacaagggttttggtaaaaatgcgtcggcgcccgcctcacgcgcttgtgtttctatttcgctccagtcgtatgcagagatgatgataatcattgtttccggccctacgagccttcggatacgcctggtcgtttcgacgccgtctatgtcgggcattttccagtcaataagcgcaaggctaaacggcattcccctgtcaagcgcccgctgtacctcttcgaccgctttatagccggaatccacccacagggaatccgccccgatattatttaaaattgcgcctgactgttcaccgacgacctcgtcgtcgtccacaacaagcacccggacgccgtgaaaaacttctttggcctcgcgctcctgccgctcaagcgtatggtcgtccgtcaggccgagcggaaccgtcacagtaaactccgttcccctgccgcgttcgctttccacagagattttcccgcccatcagctgtacaaggttatatacgatggaaagtcccaggccgctcccgctctggttgcgtgccgtatcggcggcttcctgctcaaagggctggtaaaccctgtcgagaaaggccttggacatgccaatgcctgtatcctttacggtaagctccagataagaaaggctccccgtcctgtgcgcctcccgtattccgagagtaattcggcctccagacggcgtaaacttcagggaatttgaaagcaggttcatcaggatttggttgagccgcagggaatccccattgtaaaaccgctcgagcggctcggcatgatgcacctcaaagctgattccgcgtaccgatgcctgcgggtaaatcacacccaccaagtcggaaaccagctcggtaaagtcaaattttttattgttcagcgccattttaccgcgttcgattttagacatatcgagaatatcgttaatcaaggaaagcaggtatttagaagacgcgtcaattttcttaaagcagtcgagcaccctcgttttgtcgttcagcttgagctgcccaatcgtgctcatgccgataatcgcgttcatcggcgtccggatatcgtggctcatccgggacaaaaaatccgattttgcgctgttcgccgcctcagctgcggcaagcgcgccgcgcagaagctgctcctgcctcgcctgcttatcgcgctgctcgtcaagaatccggaaaagcataatggcaatctcgtcttccccgtatgggttctccacgcgtacgacgtgcgcggaaacccaatggtatttcccatcgtcccccatctgtcggacctcggtatacacctcgctgcaactgcttcggaagctgccgagaattgcctgcggcataaaatcctttaaattggcccggtcctccggatgtatttttggctgtacgctttttatcatctcttcgtaatttccgtgcggctgatgctgtgtaatgaagctgccggagctgatgcagtcaaactgattctgcgacaggttgagcttcataatcaaagggtaggccgtaaaaatcgaagcgcgcagaatccggttttcaagctgctgttcctgctcccgctccttacggtaccgcatattttctgtaatatcgttaaacgcggcctgaatgaccaacctgccgtcggcattcgtcaggcgttccattgtcacgctgataaagcagcgggagccgtccttccgtacgccctcacgttcgtaggaagcctccccgccttcttttgacagtttatcgattaatgcgattacgcccgcgcgttccttttccagcacaaaagaaaacggtgtgcgtacctgctgccaatattccttttcagtaaacccataaatctcccaggcgcggcggttggcatggataatcctatgctcgccgtccgtcgtgaactggataatcccgcacggcagtgaattgtaaagctgcgtgaggaaatctgcctgctgcgcgatttccttgttcgcctgtatcagatgaagctcctgcatcttatgcttggttatatccgtgataaaacaggaaatcacgcgctccccgtcccggtcggttatgagcttgccgatgtccatgacatacagcaccgaaccgtcccggcgtttgacgcggtactccgacgtataggaaccgctttccttcagggacgccgccaccagcttatgcgccgcgttatagtctgtttcttcaataaagccgcggaagcagtttccggtgaaaccaataaactcttcagggctgccaaacccgagaatttcgcaaaggcccgcgcttacccattttaaggaaaaatcctcatcagggtatacgagagccataccgcccggcgtctgtgcaagcatcaaatcaatctgcctctgctgctgcgccacggtttcccgtattctttcgtattcttcctttgcatacttcaccgggaaaagctcttcgtctttcaggtttgaatatgcaatggaattatgtatatgggcgcactcaagcgcgccgccatttctttcaaatataaaagtgcagcgctggcgctcccgcattttcatgtgggtttccttttttgcctccagcatgctttccgcctcgcacaggtaccgtcccgggcccagctcctgcacgacgtagcgttcgtcccacatatcaaagggaatcgcctcatccctgcccttgaggaactgacggctgacggcttctctgccttcagcgtgctggtgctctcccgctccgagccatacgatgccgggcgcaaaggtggatattaaaaagtcgatgtccccgttgcagaaataacgccgcagtatttcatctgcaaacgacgcaatttccctctcttctcctttggtcatgatgtgtgttctccttctggtgcgctcggaatggatgccctgaaaatcccgcctgcaataacggcgcccgcctgtccaatctgtgaactggctactttcccgattatatcacagccgccgttatacttacagcgttttctataaaatgtcagccttcctcgttaaaacgcgcgagaaacgcttttgtccggtcattctgtgtatttccgaaaagctcctgcggcgttccgctttccacaattacgccgtcgtccataaaaataacccggtcggcgacattgcgcgcaaacgccatttcatgcgtaacgacgaccatcgtcattttttcggcggcaagtgaacggattacccttaaaatctcgccggtcagctccgggtcgagtgccgaggtcggctcgtcgaacagcagaagctgcggcttaagcgcaagcgcgcgcgcaatcgaaacgcgctgctgctgcccgccggaaagctggtgcggataggcgcccgccctgtcgcgcaggcccattttatcaagcagctcatacgccgctttttccgcttcatccttcggcgtttttaacacggttaccgccgcctctgtaatattgcgcaaaacggagaaatgagggaataggttaaaattctggaataccaaacccaggttcaagccaatccggacgcaggtttttttatcggcatactgcgctttcccgttttctccagttttcaccagcgtttcgccgcaaatgacgatttcgccgctgtcgatggtttcgagttgtgtaatgcagcgcaggagcgtgcttttgcctgaaccggacgggccgataatcgcaagcacctcgccctcgtttacgtcgaccgatatatccttgagaacctctgtcttgccgaagtctttttttatattgttagcgctgagaatcttcatcgtgcttctcccttcacataagtcctgtacgccttcttatttataatagctgagcttcttctccgcggcggagaagaaaagcgtgaccacaccgttcataatcaggtagaacagcgccgcgacaatatatgggacgacgcttacagaagaatttgcaaacatcttcgtaatgttcatcagctctacgacagagatggtaagcgctaaagaggtatccttgacgagcgtaataaactcgtttcccatgggcggcagaatccgcttgacgacctgcggcagcacgattttaaaaaaggtctgcccgcgcgtaaagcccagaacccgggacgcctcatactgcccctgcgatatgctttcaattccgccgcggtaaatctccgcgaaataggccgcataatttaatgaaaacgcgatgatacacgccgtaaagcggtcaaacacaataccaatgagcggcataccgaaaaaaacgaacatcagctgaagcatcagcggcgttccgcgcatgataagcaggtatagctggaccgggtagcggataatcttatatttcgacatcctgccaaacgaaacaattaggccaagcggcagagaaaacagcagtgtcagcaaaaaaatcagcaccgtaaactgggttcccttgagcatttcctgtattaaaagctgaaaattcatacagattcccctttatgtataatataagacgtacgtattaatccaagcacacagccagctggctgtgtgcttggattgttccgcaagcctgccgcgggagataataagggcggacgaagcgtccgcccttaagcgttccagttaccgtttattccactgtcgtaatatccttttcaaaccatttgtttgaaatttccgcgagcgttccgtccgccttcatctcctgaagggcgccgtaaaccttttccatcagggcggtgtcccctttacggaagccgatgacataatcctcggctgcaagggaagcgttttcgcccttgccgtcctggacaatctggtaggcgccgggctcattctgcaggtaatagcgggcgaccacctcgtcaattgcgacaacctgtattgtattgttcttaagctccatgagcgccgaagtatagttttcgataccgaccacttcgccgagcgtggacttaaacgcttcgtttttattcagcgccgattccgccgagctgtccttctggacgccaagcgtcgttcccttaagggattccattgttttatattcggagctcttgagcgtcagcaggtattgctcgtttttcatatacggcttggaaacaagcatcgatttggcgcgttcctcggtatagctcatgccgttccatacgcagtcgatgtttccgccgtcgagctccatctgcttgttgtcccagttgataggctgtgcgacaaactcaacgccgagcctcttacacgcttcttttgcaacgtcgatgtcaaagccgataacctcacccgtctcggtattcttaaagcccatcggcgggaattccgcatcaagcccaaggacaaaccttccggcatcctttaccttcgtccaggactcgtccttttcaggggcggatgttccgctttccgagcctgtaccgctgttttgggaaggcgtaccgctttccccggcgccggtacagcccgcggcaataaccgccatcattgccgcggcaagcaaaaccgcaattattttcttcataaaatttcctccgaattcattttttgccgagcctgctgcggcccagccgacaagcaaaattttatcatattaataaagtgaagtaaataggcaaattcgacaaatgggcggaggttccatgcttttgcgctaattccttccgtggaacagggtacttttcccagtgttttcttttttcctgatattttaataaaggcaggtgctgctcaaaaactttttacgctggtgaaacggcagccaggctgttattcatagaggttattacgcttactaatcgtattagtaaccagaattttcccgcagcgtttgcccgccggcctccccctgctggatacgccaatcatgcgagctttttgcatttttgtttatataaaaaagcccctccggaacccggagaggcttttcttttcgcaccgttaaaactctatatcaaagaattttattcctgctcttctctcattttagcgaagcattcgctgcaatagacagggcggtcttccctgggcctgaacggaacctttgcttcctgaccgcaggacgcgcaggtagcggtgtacatttcacgctcgggtctgccggcgttcttgcgtgcgtcacggcagggcttgcatctctggggctcattgacaaagcctttttccgcataaaattcctgctcgccagcggtgaaaataaattccgaaccgcagtccttgcaaatgagagtcttgtcttcgtacatgtgatttacctcgctttggattaaataaattttcgccccaggacggatttgcaccgacgcctttgtaaaacaacgctcttctgtaaaataagctacatgggacatttttatcaaacgcttttgagcttcctgcggattctctgtaaagcgttatcaactgattttacggatgtttttaatgtatccgccgtctgggcataggaaagtccgctcaggtaaaacgacaacaccttttgttcaaacggggtaagctccgtttgtatgcgcatcatcatctgatggtatgcctctttatcaattagctcctgttcgggagacacgcctgcctctcccttttcctccagggtatcgtccgtcagtgggacaagcctgtcggagggtatgtttttaagccgcttttcgcttttatagaccgatttaaacctgcgttctatacaaatacctgcataagttgaaaagctggcgcccgctttttcatcaaagcccttaaccgcgtggagaaacgccagaaagccttcctgtataaaatcgtcaagctcagtcttggcgcccccgtacagggaagcctttgccctgattaaaggaaggtagcgctgcgcaagcacatcaaaggcgctgttttgcccccgacgggtcagttttatcagccggtcatcagaatattctctcaaatcctgttccgactccctgttttccataaaacaaccccgctgaccatatgctcacttatacggctctcatgatacatcatttgtttgaataagtcaacaacttttctgtattcctcgtaaaatcaaaaaaatatgtgttttatttttatgcagattctacataaactatgcaaaaccgccgttgtttgactaaaatagtccgcccttattccgcatccgaatgtgaataattcaaacataaatcaaatttattatgtattcgatatataatataataatcgattgtacaaaaaggagtaatattatggtagtatgctgcagcatgggcctgtatgggctggaagcgtttcccgttcgtgtggaagcggacattcaaaacggcataagcgcgtttgacatagtcgggctgcccgacgccgcagtaaaggaatcgcgcgaccgggtacgcgccgccctgaaaaactgcggatatgaattccctatcggccggattacagtgaacttagcgcccgcagacatccgcaaggaagggccgctgtacgatttgccgattttaatcgccctgctgcgggcaaccgggcaaattgcggactacgcgccggatagcgcatttctgggcgagctttcattaaacggcagcgtacagggcgtgaccggcgttctccctatgacaattgcagcacagcaaaaaggaatccgaagcctgtatgtaccgtccgataatgctccggaaggaggaattgtaaaaggtattgacgtttatcccgtaaaaagcctcgaacagcttatccttcatcttcggggcagcaagcccatcgcgcccgcctcccctccggaaatagcccccatacccgacggcgcggttcccgatttttcacaggtcaagggacagaacgaagcaaaacgcgcaatggagattgccgccgcaggcgggcacaatatcctgttaatcgggcctcccggctccggaaaaagcatgctggcaaaacgcctgccgtctattctgcctgatatgacctttgaggaaacgatagaaacgacaaaaatccattccatcgcgggccagctgaaaaacggaagttccctgattacccgccggccgtttcgcagcccgcatcataccgtatccgccgccgggctctccggcggcggcgcggtccctaagcccggcgagctgtcccttgcccacaacggcgtgctgtttctcgacgagctgccggaattttcacgccatacgctcgaggtactgcgacagcctattgaagatggctgtgttaccatatcgcgcgtaagcggctcgctcagttatccctgctccattatgctcgccgccgctatgaacccctgcccgtgcgggtattacggccacccgtccagaaggtgctcctgctcgcagaacgccgtcgcgcgttatttgtcacgtgtctcagggccgctgctcgaccggctcgatttacatattgaagtacctcccgtcgcttttgaagagcttacccaaaaacaaagcagtgaaacctctgcgcagattaagctgcgggtggaggaagcacggagcattcagcgtgaacgttaccacggcaggggtatcccctgcaacgcgcggctcagcccttccatgctgagggaagcctgccctttggattcgcaggctgaacgtatcctccggcgctcatttgacgagctcgggttttccgcgagagcatacgaccgcgtgctgaaggttgcgcgaacgattgcggacatgcagaagagccaaataatacgtgcgccccacattgcagaagctatccaataccgcagtctcgaccggaaatattggcgttctgaataataaaccataaagacttaaacaaaacagggaaatgcgaaaggctcaaataaataaattgtataaaatattttaatgacaggcagctagacacgtgaaaccggctgcctgcttttccttttacttcgggcaaaaggaatgtaaaattttatacgtctgctccttattcctttagttgttcaattacgctcataaccaggctgacgtgcttttctgaaaggccctcaacgctgagtgaaagctccttgtcgattccgaccaggtaatctatggaaacaccaaaaaacctggccagccgaatcattactttatagggcggctgccgcgtcgaaagctcataggaagaaatcatgacattacttaccccgacaacctgtcccagttcctcctgagtcatgtgtttcgcttttctgagtcttcgaagcttgctacccatttcaaccatgttctatcacctttcaaaagctgttttgcgtcttttacggacatgttatacatcttccaaggcaaatatagcacaatatcgtcataaagtaaatacgagataaatgaaatatcaagtgaaattatatcacaattaatagaaaaataaggggatttatggcatgatattaagggtaggacgcttaattcacaatatacagtcttcttttggggaaataaaacgaaatatatagatttaatttagatatatttcgacttcaaacgttgcaattgcacataaataagagttaaatttaacttaacataagcttgtaataaatataaaacggggtgtaaattatggcgattaaaagtttatccatacgcattgatgaaaagatgcttcacaagctgcacgtcctggcggattatgagggacggtccgctaacagccaaatcattattctgatacgcgatgctgtaaaggaatacgaagcaaagtatgggccaattgaagtcgacagctaatcaaacggctgccagcgctctttttggtccgggtccgggggctttctttttctgtttaaaactgacaggagaaggaggcccttgctgtttctctccatccctgtgtcaatcagacatataccggcacaattcttcttaattcttcaaaaaagcatatgcccgcgcacatatccctgcgcctgttggcacagaattccgttggcgctccaccgctttgtgtaaatatttacaaatttggttaaaatgatgttaccatggggaaatccggttgacattggaagcaatttgtattatgattgcaggtagtgttttttggtaatgttgcattattgtgtaccttcttgtttgatgataacagccaaaaaaaacgggctttattattgattacgacatgtttcggttttatccgaatgtttctctacatataacaaatgaataaaatattacgtaacgcttgttggatgaaaaatgtatttgggagtgtaccgtattggataaatatgtgattaacggcgggcgccgtttatcgggagaggtctccgtcagcggggcaaaaaacgcagcagttgcaattattccggcagtcgtccttgcagacggaccgtgccgtattgaaaatataccgaacatcagcgacgtcacctttattgcaaaaatccttcaggaaattggagcaaacgttaaaagaatcaacaaatccactttggaaatcgatccgcggactgtaagcacgtccgttgcaacatatgaacaggtcaagggaatgcgcgcctcctattacctgctgggcgccctgctcggcagatataaaaaagcgcaggttgccatgccaggcggctgtgactttggtgtacggcctgtggaccagcatctcaagggctttgccgcccttggcgcaaagcatgagcttatcaacggcgccgttatcagcgttcaggccgacaggcttctgggcagccatatttatcttgatgtggtttccgtcggcgctacgatgaacattatgctcgcggctgtaaaggctgagggcttgacggtaattgaaaacgccgcgaaagagccgcatatcgtcgaccttgcaaactttttaaactccatgggcgccgacgtacgcggcgcgggaaccgacgtaatcaaaataaggggagtcgagcatctgcacggcactacctattccattattcccgaccagattgaggccggcacctatatggtcgcggcagcggccacaaacggggacgtcctcatccgcaacgttattcctaagcatttggaatccattacggcaaagctgcgtgaaatgggcgcggttgtggaggaatatgacgaggatatccgtgtcagaagcgaaggcaggctttcgcgctgcaatatcaaaacgatgccgcatccgggtttccccaccgatatgcagccgcagttcgcggcacttctttccgtcgcgaacggcacgagcattatcaatgaaaacgtctgggataaccgcttccggtatgttgcggagctgtgcagaatgggtgcgcagatttctgtcgatggaaggcttgcgattatcgaaggtgtggaagagctgattgccgctcctgtcaaagcaactgacctgcgcgcgggcgcagcgatgattattgccgggcttgttgcgaatggctcaaccgaaattgaaaatattatccatattgagcgcggctatgaggaaattgtggataaattccaaaagctcggtgcggatattaaaaaggaacgcacccgtacaacaaccgaggttgttacggcttaaaatataagacaaacagcaggtttcgcttggaaatttataattttactttccaaacgggcctgcttctggtataataaccttacatggcggggcggacattttgtctgccttattttttcataaaatagggaaagatagaaaaggtgaaattgggatggcacgtttatgcccgctctacagcggaagcaaagggaattgctattacataggcagcggcagcggcggcgtattaatcgacgcgggccgcagcgccaaacagattgaaacggccatgcgcgacaacgggctcgatatggccggcgttcatggaatatttgttacacacgagcataccgaccatattcagggacttcgcgtgcttgcgtcgcgctaccgcctcaacgtttacgcttctaaggggacgctcgaggcgcttggcaggcagggcgtgctgtgtgacaaatataaaacctacgttattccaagcggcggcgtacagacggacgatatgcatatcattccgttccacacgtcgcacgactgcagcgaaagcatgggctttgttgtgcgcacgggtgacggcaggagtattgcggtcgcaaccgatacgggtattttgtcggaggaaatcgaaacggctgtatccggctgcgacgcggtcgttattgagtcaaaccacgacgtcggtatgcttttaaacggtatttacccatatccgctcaagcggcgtatcctgtcggataaggggcatttgtcgaacgatacctgcgccgaattcctgccaaggcttatcgacagcggtacgacccggctaatccttgcgcatttaagccgggaaaacaacatgccgcgcattgccgagcagtcggcgctttgctcgcttgagggcttcggtatgcgcaggggaatcgattttatgctgtcggttgcgcccgaggcgaccaagggtgaaacaatcgttttgtaacgtaacaaattccggggagaataaccatatggtcacggtaaatattatctgcgtagggagcttaaaggagcaatactggcgggacgcctgtaccgaatacgaaaaacgcctgcgccccttctgccggtttgcggtaaaccaggtggacgagcagcgcattccgcagaacccgtcccaggcgcagatagacgcctgtatttcagaagaaggcaaacgccttcttgcaagggttccgcgcggcgcttataccatagccatgtgtattgaaggcagggagctttcctccccgctgcttgcgcagaaactggaacatgcggcggttggcggcggcagcagcgtcgctttttttatcggcggttcgtggggcttgtccgaagaggtcaagcggcaggccgacttcaggctttccatgtcccctatgaccttcccgcaccagcttgcgcgcgtcatgctctgcgaacagatttaccgcgcattccagatttcttccggcggtaaatatcataaataaacccggtgaagagattactgttactgccataaaaatccgttttctgaaagggtgcgctatggagcaatatataaatttattaaaagaaaagggcgcggattttgcaatcattatagataccgaaacggtcgtcaccgcagcctggacaatatacaaatgcaaattcggctgcagctcctatggaaaaaaccactgctgtccacctaacgccccaacttataaggaaacacaggaaatgcttggctgttattcaaagggcatcctgttccgtacccatgaagtaaacacggttacgcccctagctgtagaagctgcaaggaaaatgtttcttgacggctattataaggtaatagcctttggagatggggactgccagaaatgtattaaatgcgctcccgaccgctgcgcttttccgggaaagacagtcccttctatggaagcctgcggaatcgatgtgttcgcaacggtccgagcaaacgggctggaaatccatacgcttcgggaaaaaggagagccgcagaaccatttcggcttaattttatttgaataatactaaattgtcgttttaacggaaagggggcgtttttatggcgctcgacggcgcttttctgcgtcatatcaaaatagagctggaagaagcactgatcggcttccgtgtggaaaaaatataccagcccgccaaggatgagattgtcctttccatgcgcgggcagggcggagcaagaaaactgctgatgtccgcaaaagcggattccccgcgcgtacacctgacagatttcgcgccggaaaatccgcagacgccgccgatgctctgcatgctcctgcgcaaacgccttacgggtgcaaagctccgggcaatccgccagccccagctggaacggctgctgtcgtttgatttcgacgcgacaagcgacctgggtgaccgcgtcagccttactcttacggtagaaatcatgggtaaatacagcaacgttatcctcgttgacgaagcgggcattatcgttgacgcgctcaaacgcgtcgacgcggcgatgtcttcccagcgcctggttttaccggggcttgcctatgaaatgccgcccgcacagaacaagccctgcgtgctcgacacgcctgccgaggacattataaaaaggcttagctgtatagaccgggatatggctctccacaaggcgctcctgcaaaacatccagggcgtgtcccctatcgtctgccgggagcttgagcacctgacgggcaggggtgttgatatcagcgtcaaaaccatgaccgcagagcaaaaacagcggctgtctttctttttgaacagattatccggtgtaatcagggatgccgcgggcacaccgcatatggtctgcgaattaaagggaaaaccgctcgatttttcgttcaccgacatcgcgcagtatggcacggcggctcaggttaagcgcatcgagcggttcagccttctgctcgatagcttttattttgaacgcgaccgcgccgaccggatgaaaaacaaatcgcacgatttattaaagctgcttgcaaacgcgtccgaccgattgtcgcgtaaaatcaacacacagcaggcggagctgcaaagatgctctgaccgcgagccgctgcgcgtctgcggggatttaatccaggcaaacctttaccgcattgaaaagggcgcgccgtttgcagaccttgaaaatttttatgaggaaaattcccctgttttgcgcgtaaagctcaacccggcgctctcagcgtcgcagaacgcgcagaggtactataaggagtaccgcaaggcaaagaccgccgagcaggtgcttgccgtgcagattgaaaaagcgcaggaagagcttgcgtatattgaaaccgtattcgacgcgctttcccgcgcacatacagagcgcgagctgtcggaaatccggcaggagcttatggaacagggatatgtcaaaaaggcgcgcggcaaacaaaaaacgcctgccgccctaccgccgctcagctttacgtcgagcgaaggctttaccatactcgtcgggcgcaacaaccgccaaaacgacaagctcacgcttaaaacggcgaacaacaacgacgtctggttccacacaaaaaatatcccaggctcgcataccgtcattgtgacggacggcaaaacaccgggggaagaaaccattttacaggcggctcggcttgccgcttaccacagccgcgccagggacagcgcgcaggtgcctgtggattacacgcaaatccggtatgtcagcaagccgcagggcgcaaagccgggcatggtgatttataaaaacaacaagacgctttatgtcactccagcggcagatacaggggataaataaaaaaggggacggaaaaatccgtcccctttttatttatgggcgtattaatatcccatgtccttatccgtttttaaaagcagtataatcccccggcggaccgcttttccttttgtaacgccttttttcgcgcagtattccatcagttgcctgtcagtaatcgcgtccagcctgactgtcgttttaatattgattgggttttcaagcctcggcctgcccggtttcctcttccccattttataaccacctcatttcacatcacaataaagcataaaatatgtttgcagtgaagtgggcattatttgaaaaacaatcacaaaaaatcttttttgcgcggtaaaacccggatattgctttttttcttttcttcggctataatcataaaaagacagaaaacgcgcaaaatagcgtcagaaataaacggaggtataacaatatggcacagattacaaaagatacgattatcggcgatattctggatatggacaacacaaccgccccctttttccttgagatgggcatgcattgccttggatgccccgcatcgcgcggcgaaactatcgccgaggcatgcatggtacacggagtagacgcggacgagctgattaagaaaatcaatgaacatcttgcaaaataaacagtccggcgttaggggcagggttacctgcccctttttacgttgttttatctacgctttcaggattttattttataaagaaaggggtgtccgcaagtgggccgtcctttgttccagcttgacaaccgcctcgcgctgtgcgccaaatatgtgcggcaggatgcagcgcttgccgacatcggcaccgaccacgcctaccttcccgtatggcttgcgcgcacagggaagattaaaagcgcgctcgcgtgcgatttacgggaggagccgctgaggcacggacaggcgaccatccaaaaatatcacgcggaaaagctcgtcaaaacaaggctttccgacgggctccaaagcatattccctgatgaatgcggcgatattgtgattgcaggtatgggcggggaactgattgtacaaatcctttcccatgccccgtgggtaagggacccaggcaaacgcctgattttacagccgatgtcgaaggcggaggtactcagaagctatctttcaaacgaaggctttgcaattttacaggaggaggccgtccgctcgctcgggagaatttacagcgtaatgcggtgcggctataccggcaaaaaaatacagtccggaattttggacatctacaccggcgcgctccaaccgggggacaggccgcttgacagggaatatatagaaacggtttgccgtaacctgcaaaagaaggccaacggtcttcacgccgcggggaacgaaacagaagcgcagccgcttttcaatttaattacggccctgcaaaagcgggcgggtataataaaaggaggaactgattgaatggcaaccgtacaggaaatatatcattttatagacagcttcgccccattcgacacagcgatggattttgacaacgcgggcattttggcgggcgacaggaacgcgcctgtaacaacggcggtagccgcgctcgatattacgcccgccgtcattgaagaggctgtggaaagcggcgcgcagcttatcatcagccaccatcccattatctttcagccgctgcgtaccctgccaaacgacagccccgccgcgctgcttatcaaaaacgggctgaacgccctgtgcgcgcatacaaacctcgacctttcgcctgagggcgtaaacgtccgccttgcccaagcgctttccctgcaggacgtccggctggtggaaaacgaatgcatcgccctcggtacgctcgcgggggaacaaaacgccagggagcttgcgctgcatgtcaaaaaggccctgtcctgtaatggtgtacgttttatcggacttaacaaaaaaatcagaactgtcgccgtaagctcaggcgccggaggcgacagcctgtaccgctgcaaggagctgcaggcagacgcgctcgttacaggtgaaatcaagcaccatcagctgttagacgcataccggatgaacgtcgcggtcgttgacgccggccacttctgcacggagaatattgtaatcaaaccgcttgtccaaatgcttaaaaaagaattcccgtctgtggaattcatcgaatcagcgcgctgcaccgacgcggtcgaatacgtttaaaggggtacgcatacatttaaatagaaaaaccggcgcacgaatcggctgctgcgccggtttttctatgctgcctgattgcgccgcttcccggtttttcataagtttgcatttacccatgtaaaaattcgccaaaaaagcgcaggaaatcgcattttatattgacttgcatattataaaatactataattagagcgttagcaatttcacaaacttatcaggtttgtattacagtaaagcgccctccgcggcgcagaagaaaggaaatgtttcacagatgagcagagtttacaatttttcagcgggtccctccatgctgccagaatccgtactgaaaagggcggcggcggaaatgctcgattatgagggcagcggccagtccgtcatggaaatgtcccaccgttccaaggtatatgacggtattatcaagggcaccgaggcactgcttcgggaggtcatgagcattcccgataattacaaggtcctctttttgcagggcggcgcgtcctctcagtttgcaatggttcctttaaacctcgctgtcaagagcggcaaggctgattatgttctgacaggccagtgggcgaaaaaagcttacaaggaaggctcccgctacgcgcaggccaacgtggttgcttcctctgaggacaaaacgttttcctacataccaaagctcgacccgtccacctttacaaaagacgcggactacttccatatctgcatgaacaacaccatctacggcaccgtttaccacgagctgccggacacgggcgacgtgccgctggtagcggacatctcctcctgcatcctgtcccagccgattgacgtgtcgaagttcggcgtgctttacgcgggcgcgcagaagaacatggcgcctgccggccttacggtcgtcatcgtgcgcgaggacctcatcggcagcgcgcagggcattacgccgacaatgtttaactaccagacccacgcggacaacgattccatgttcaacacgccgccgtgctacaccatctatatggcaaagctcgtgcttgagtggattaagaacgaaatcggcgggctcgataaaatgaaagagcgcaacgaaaagaaagcaaagctgctgtatgatttcctcgacggctccaagctcttcaagggcacagtcgttaaagaagaccgctcccttatgaacgtaccgttcgttacgggcgacgctgacatggacgcgaagttcgtcaaagaagcgggcgagcgcggctttatcaatattaagggccaccgctcagtcggcggcatgcgcgcttccatctacaatgccatgccttatgagggcgtggaagcgctcgtaaaatttatgggcgagtttgaacaggccaattcctgattccgtcaaataaactatccgaaggaagatgaacgatatgtacaatattctcacactcaacaaaatcgcaaaaacagggcttgaccgccttggcgaaaactatacctgcacgggcgacgcgcagaaccccgacgcagtccttgtccgcagcgcttccatgcacgatatgcagttcggcggcaacctgctcgccatcgcgcgggcgggcgcgggcgtcaacaacatcccggtcgataaatgcgcgcaggacggcatcgtcgtgttcaacacgcccggcgcgaacgcaaacgctgtaaaggagcttgtcatcgcaggtatgctcatcagctccagaaaggtcatcagcggcattgaatgggccaaaaccttaaagggcaacggcgctgaggtcagcaagatggtcgaaaagggaaagagccagttcgcgggccccgaaataaagggcaagaagctcggcgttatcggcctgggcgccatcggcgtgctcgtcgcaaacgcggccacctcactgggcatggaggtttacggctacgacccgtacctctccgttgacgcggcatggcagcttgagagcaatatcaagcactccaccgcggtagataccatttttacagagtgcgactatatcaccatccatgtgccgcttactcccgacaccaaggaaatcatcaacgcggaaaacatcgcgaagatgaaggacggcgttcgtattttaaacttctccagggccgaccttgtctgctccagggacgttgtcgaggcgcttaagtccggcaaaatcacagcgtacgttacagacttcgctaccgacgaggtcttgggtgaagacggcgtgattgccctgccgcatctcggcgcctccacaccggaaagcgaagacaactgcgcacgcatggcggctgacgaggtcaaggattatctggaaaacggaaatatcaccaactccgtcaacttcccatccatctgcatgccgaaaagcggcgaggtacgttactgcatcctgcacaagaacgcgccgaacatcttaaagcaagcgctttccctcatcggcgacctgggcgcaaacgttgagaacatggagaacaaatcaaagaaggataacgcgtacacgattattgacgcaacgaacgtaaccgccgaaatcagcaaggagcttgcaagcattgacggcgttatccgcgtccgtgttatcaaataaggcacagctttccgcatatacaaagcctcctgtaaaacaggaggcttttttatatttatatatacagcccggcgcccggcccaagcggaattcctgtcagcatccaaataatcagaagcagcgaccaaccgataaggaagaacaggctgtacggaagcatcatcgaaatcagcgtcccgatacccgcctttttatcgtaccgctttgcaaagacgacaatcatcgcaaagtaagacatcagcggcgttatcaaattggtacaggaatcgccgatgcggtaggcaacctgcgtgagcgccggagaatagccgagcatcataaacattggtacaaaaatcggcgccaggattgtccatttggctgttgcggaacccatcagcaggttgataaaggccgtaaacaatacgaaaattaccataagcgccggtccgctgattccggatgccttgaggaaatcagccccgcttatcgccaggattgtccccagcttgctgtaattaaaaaagctgataaactgagcggcaataaaaatcaatgcgatatagcttcccatggtcgccatgttcttttccagctgacgggcaacgtcgccctcgcccttgtacgttcctgcaatcctgccatagacgacagacgggataaaaaagataagcgccaaaagcacaatcaatccgtcaatgagcggcgcgcccgtcgtcaggcttcccgtttccgggttgcgcagcagggaattttgcgggatgcaggcgattataatccctaaaatgagcagaagcagaacaattccgcctgctttcaggccctttgactcgcggggcgacagccttgtcagagcgtccgcgccgtggtgctcctccggctcaaactttccaagccgcggctccactattttgttcgtgacgaacgtaccgataacgacaatcagcagggtcgaaacaatcataaaaaaccagttgtcggtcgcatgtacgacaaacccgttgtccacaatctgcgccgcctccgtgctgatgcccgcaagcagcgggtcgagcgccccgataataaggtttgcgctgaacccgcccgacacgcctgcaaacgccgccgcaagccccgcgagcggatgcctgccgtacgccataaaaataagcgcgccgacgggtattagtataacatagccgatgtcggtcgcaacgttcgacataacgcccagaaacacgagcatcggcgtaacgatggcgcgcggcgtgacggcgaccatttttttgagcgcggcggacagaaagccgctaccctcggcgcagcctacgcccagcatggtgacgagcaccacgcccagcggcgcaaagcttgtgaaattaccgattaggttcgtaagcatatagacaatgccgtcacgggaaaggagcgatacggcagtgactgtctgcgtcgtcgtttcgagcgtatgcgaatcgataagctcgcccgttgcggaaacgccgagccagctgcacagcgccgatatcaggatgattgcaagcgcaaaaataccgaacagcgtaatcgggtgcggcagcttattgcccacgcgttcaatcccgttgagtatcctgttaaaaacagaaggttttctctttttcgttttttcgggtgacataatccacctctttgtttttaagggcttaatacgcctcttttttccactccttattgttgctggatttttggaaaaaaaccgaaaaaattaaaattcatttaaattggctgtttttaacgagtaaattttttacttatccgcaatctggttataaacattgattgcgtccaatatgtgaaacggctccgtatcgagcgtaccgtttgctttcgctgtgaccaaaatatattccgtcccgtttacttccgcaaggcttgcaaggcacagcccagcctcatcagtaaagcctgtcttgcctccaagaattttaccgcccggaacctctgtgccgtctaaatgcctgaacatgctgctgtaaaacgtaaatccctgcgggtgctgcccggtagaaaccgtcgtataaaagctgctcgtaaaggcccgccggaaatcctggttctccagggcatagcgcagaaggatagcaatatcctccacggtagagtaatggcctgggctatgaaggcctgtacaattacaaaaatgcgtgttcttcattcccagtgcctcagctttttggttcatcagccctgtaaacgcttcctctgagccggatatcccttcggcaaacgccatacagcattcggcgcccgacgggaggagtattccgtataataaatcccgatacgtaacctcttcacccggcgcaaagcccgccatagaggcaccctcttcatacagcctttcaaaaaagccatagggcagcgtaattgtgctgtttaagtcttttgtgtgttcaattgctaaaaccgcagtcataatttttgtaagggacgccggataaatccgctgcgcgctgttgttttctgcaagcgcgctgcccgtttccctgtttatcaaaacagcgtttgggctatataaaaaattcaaattcactgaacccgaatttttgctgctgaatgtttttcctgccgttgcttggctccctgcagccgcaggcggcaagaggggcgtatacacaaaatacaaaaatcccactgcggccgctgccgcgacagcaacgactgcgattgaataaaaacgcagggtcctgccccttgtatgctgtttccttcgacgtgaattgttcatggccgtaccttccttccctttttaaaaccaaacagctgctgtccggtatttattctaccgtacagcagccgtctgcgctttaatattcggttgttctattcttaagaaaaagctaagaaggggtggaacttttattaagctttcaacgggagtgagacgcagaaggttgtcagctcgttttcgctttttgccgtaatgcttccgctgtgcagcgtaacgatttcctttgctatggcaagtcccagtccggcgccgcccgtattggttgtgcgggcttcgtccaggcggaaaaacttttcgaaaatattctcaagctttacagcgggaatggtttttccccggttgcgtaaaaataccttcaccctgtttgggtcagcttccgcccatatctcaatcaatgtgtccggatagctgtaggcaatcgcgtttttcaaaacattgttgaacacccgcgccagcttttcggcgtccccatagaccgttatgttatcttccacgcacatttctatggtattgccgtgcgcgtttaaaagcggataaaactcgtcggtcatttgaacgagcatatagcacaggtcaatggtttctttttcacaatcaatttgctgtaaattataacgcgtaatttcaaaaaactcgttaatcagcttctccagcctgtccgccttatccagtgcaatatggatgtacttctccttttgcagcgcgggcatatccggggcctcgtccaaaaggctcaggtatccaattaccgaggtaagcggcgtttttaaatcatgcgcaaggtaggtgattaaatcgttcttgcgggacgcttcatcctttaacagctgcgcgttgcgctgcatagccgacctgatttcagccatctgtgccgatatttccgcatattcctttggaaaatatgccgtgctttccttttcctgcgtcatatagccgtgcatcatccggcaaaccgacgtaatggtttttttgacctgtgaccttgcatagaggaaagaagctgtaaaaacagtcagcagccagagcacaacggtacatacgaatacggtcaaaagcaaagcctttacgcttgaccacaataaatcacgagccacaatttccttcccgatttccggcaaatcctcgttgtgcataaacataaaattagcctcaaaccaatcgacaaaggcgccgttaaaataagtatccgccaaatagaatacgaaaaaacacattgccgcgccggcggcgcacgcaattaaaacaattaccggttttggaattttacgtttcaattttatatccgcacccccagactgtcttgatatattttggcgtttcgaaggaatcccccatcttctccctcaaatggcggatatggacggtaatggtgttgttgcttttactgaaatactcgtcgccccaaatttcatggaataactgctccgagcttaccacgttccccttttgcctgcataaaatccgcaggatggagaattcggtcggtgtcaggttcaagggcttttcattcaaggtacattcatgcgttttcgtgttcattaccaggcccgaatgaacgataatatcctcctccggcagcgggctgttattgtaccgcttgtaccttctcagctgcgccttcacgcgggctaccagctccagcggcaaaaagggctttgttatgtaatcgtctgcgcctaaggtcaggcccgtaattttgtctatctcctcccccttggcagtcagcataatcactgggtagcggtattgcagttccctgattttttggcagagcgcaaggccgctcatatcgggcatcatcacatcgagtaccgccaaatccagcgtttcctcctgtatgcatttcaaagcatctaaagagctgtaaaacttaaaaaccgtgaaattctcgttttcaagatagagggccacaaggtcggcgatttccttttcatcatctgcaatcaatatcttttccggcataatttggctcctttcttctatatatatcattttacttccttacaatcgcccatttataaagattaggataaggcggaattaagattttcctaagacggccttttcccgctgttgggatgcctgccagacgccgtcccgccgtccaacgcgtatatcaagtccattatatatgccagggcagttaatcacaacaaaatcacgcctgagaattctttacaatttgcttgccgcaaaaacgccccgcggaatatccgcagggcaaatttacttttatttttccgggctttccagataaccgatgccgcaggacatgattttctccgccgtccggcctatttcctgcgcggagcgcaccatgccctcttcgagccactggcgcaaaagcccgatacagcccgagcttacaaacgaataaaagtactcgatttgctttgcggtcgcgtttttaaagtggcgcgaatatgtttccaggcacttttccctgccgaggttcaatagctttgccataaactgcttgtcgctgtaatcgccgagcatgataatgcacatatcgtagttttcccgcaggcactcaaaaatccccatgcagatagcgaccgggcttccgtccccatgtgagagcagcggctcgagcgccttttggaaggaagcgtacatttcaccctcaatttcctccagcagcgcataaatgtcctggtaatgcgtataaaaggtgccgcggtttatgcccgccagctcgcacagctcctttactgaaatgctctgcaacggctttttgctcaaaagctcggtaaacgccttgcggagcatcagtttagtcacgcgcacgcggtggtcgctttgtatctttttcatgaatacgcactccttttgaacaggcaatgtccattatgtccgataagtcacaaaacctttaaagattggaaattgtatatttggtataagctgattataatacaattagggaagatattcaacacattgtcgattaaaagacaagcatgttcacaggagtgacctttatgaaacagctttatatcattacaggcgctaacgggcatttgggcggtacgctcatgcgtatgctcaaaaacacgccgcatacggtgcgcggcctaatcctgccgaatgaaccggcacatgacagcgaaaacatgaaatatatccgcggggacgtacgcgaaaaagagacaatgcgccccttgtttgaaggtaccggtgggtttgaccgcgtgaccgttatccatacggcgggcatcgtggatatttccgagcacgtctcgaaaaacatgtacgacgtcaacgtgggcggtacgaaaaacctttgtgcgctctgtatggaatacagggtgtcgcgccttgtttatgtaagctccgtgcacgccatccccgaacaggataagctgcacgtactgcgtgaggtcgagtccttctccccgcttgccgttacgggcggctatgccaaaacaaaggcggaggccacgcaggccgtgctcgattgtgtaaagcaggggcttgacgcggtggtcgtccatccttccggtattttagggccttacgacggcgcgggcaaccatctggtgcagatggtcagggattatatttttggaaagcttccggcatgcgtcaggggcgggtacgactttgtagacgtgcgcgacgtggccgccgggtgccttgccgccgcggaaaagggcaggacaggcgaatgctatatcctatcaaaccgccattacgaaatcagggatgttttgcatatggtgcgcaccgtcaagggcggcaggcgcattcccacgctgccggtttggatggcaaaggccgcggcgcccctgcttggatggttttccaaaatgaggaagcagcgcccgctctataccaaatattcgctttatactttaaacagcaatgataaattttcgcacgacaaggcaaccagggagctcggctaccacccgcgcgatttataccagacgattgcggacaccgtcaagtgggtctgcgcacacggcaaaaaatccgcgcccacaccggcgtaaccggttattaaactatataaaaataaacgaagggcaggcctcaaagggaggtttgtccttcgttggtttctatgttataataacctcacgccgcaagacggaagccttgccttaccggcaagccctccggcggctgagagaacattgtaacacgcgccgggacagcaaagccgtccctcttaaaggaaacaagccctacggggcttgttgatgtgttataataacctcacggcgttaaccatagctcgttcagtctacatcaaaataaggaggctttctcatgccgtttacaccccagacgctcgacttcctcgcagaaaacaagctgcgcaacgataagcaatggtatcaggagcacaagccgcagttcaagaaaaacgtgttcgagccgctcgcggagcttgtcacacagctcgcccccgccatgcatgagatagaccccatgcttatcgcggaaccgaaaacaggcaagagtatcagccgtgttttccgcgacacacgctttacaaaagacccttccctgttccgtgaagagatgtggtgcgtctttacgcgcgacaagaaggcatacacaagcgcgccgggctatttttttgagctttctcccgacgggttccgttacgggtgcggctacttcgacgcgccgccgaaggtgatggacgctatccgcacactggtattaaagcaggataaaagctttcttgcggcgaagcaggcttatgaaaagcaggatgttttcacgatggagggcgatttttacaagcgcgtgcgctatccggagcagccgcaggacatacaggactggctgcaaaggaaagggatttcctttaaccataacagcaaggatttccatctgttgttctcgccggagctgcacagcacggttgcgcagcatttccgtctgcttgcgcctgtatatgcgttttttctgcgggcgcgcctgctgctgcttgaggaaacgggcgtttgaccctgtactttttattctgtgagaacagctctcgccccaaatggacgcccatgcggaagccatatttaaaattgcggtctgccgcatagtcgattctgtctgaatattcgtctatgatttttaacaaaaggcttttctgctcccttgaaatccccgcacgcagcgtttctattgcgctttccagcgctggggagtcctctcctatatccacataggtttgggcgattttttgtaaaactttcattttttatcctccaatttgattagtcaagaaatgaatcttgcaatcattattataaatatctgattttttttgtctacaaacagagtgttatcagtctgttatcgtaatgcggaaaaagcgcatatacatcaggaaaaaaattttaaaaaatttttttagattgtattttttgtttttaaccactttgtgtttcttgtttttcttgataaatttttctatgtttaatcaaaagaggagaaaccgtttcggcggtttccctcttttcagggcgtcaggatgccgggaacaatgcgccaaatcatgggcttttctggctctggcttcgttatcgtcctccgaaggcgcaagccttcgttcgtcctctgcctcgccataaccgaaaaaagcctcatgatttggttcgaagaagtttgaaaagaggaagctccgccggttgcaagcaaagcgaacaagccatgctggcgcatggcgcgtgagtattgcgcagatagcggtggagatggccttttcaaaccgcattggctccggtaccctgacgcccgttcacctttccgccgacaagagaaaacctcgtcgcaggttttcccttgaccctttccagccgagcaaggggctgcgccccttacaaaccccacacagatagaaaccatgccgttcctcgtttgatatacggggtgtagaacagatactgcgggacgtttctgcgccgcgccttcgcgcggagtttttcgtaagtgaggtactttgtatactttttaccgtctacgttttcctactcgatttaattcaattaaggcgcaggccgttttcttctagggggattttcaaggggcttcgctccttgaatcggctgtggagggataggcggagggcggcgcgatgctttgccgcccgtaagccgtaagggaacccatcgaaagggttcccttggaaaagcgctcgaagaggggttacaaaggggaggaacagccgcaactgttccctcccctttgattgaacataataagttttatgaaaaaacccaagaagcagatggttttcttcaaaaagaaagaagcaggatgcttaataaaaaccaagaagcagaacgcttcatttataaaccgggaacaaagggttttataaaaaattcaactaaaagaatttgcaaaaacactttttgcatataacaggaggtcaacgagtggcgattctttccgttcaaaacctgtcgctttccttttcggaacgcgtcctgttcgaggacgtaagcttcgacgtggaggcgaaggataaaatcggttttatcggcgcgaacggcgcgggcaaaaccactatcttcaaaattatatcgggcttgctggagccgggcgcgggcggcgtgttcaaggcaaaggacgtgcgcgtcggctggatggagcagcacgcgaacgccgataaaagcaaaacggtatataacgagcttttgaccgtcttctcccgttttgaagcgatggaacagcagctcgaaacgctggcgcggcaaatcgaagcagacgaaaacggccgcgacgcgttgattgcgaaacagcttgcccttcacgagcaatacgaaaacgacggcgggctgacctacaaaagccgcacgcgttcggctttaatggggcttggtttttccggcgccgaaatggagctgccctgcggcgcgctgtccggcggacagctttcaaagctgagccttgcaaagcttttgctatccggcgcgaacctgcttttgctcgacgaaccgaccaaccatctcgacatcccatcggtggaatggctcgagggctttatccgcgatttcaggggcgctgtcatcgtcatttcgcatgaccgttattttcttgacgcggtaacgaaccgcaccattgagctggagcaccaaagcatagcctcctacagcggttcctatacggaattcatgaaaaagaaagaaaagataaacgaggacttaaaacgcaggtacgataacgatatcaaagaaatcaagcgtatcgagggaatcatcgaacagcagaagcgctgggggcgcgagcggaattttattacagccgaaagcaagcaaaagcaggttgaccggctgaaggacgcgctggtaaagcctgacggggaggtagagacgattcatttttcgttcaaccccaaacgcgaaagcggcaacgacgttttaatctgtgaggatttatccaaggcctacggtgaaaaaacgctctttgagcatgtaaacctgcacataaccaagggagaccgtgttttcctgctcggcgcaaacggctgcggcaaaacgacgctcttcaaaatcctgaccggccgtatcgaatccggcggggacgtgcgcttcggcgcaaacgtggacgttggttatttcgaccaggtgcagtccgacctgcatcttgacaaaacggcgctcgacgaggtctgggacacgttcccaggcatgacacagacacaggtacgcacagcgctcggctccttcctgttcaaaggggacgacgtgttcaagccggtaaaagccctgagcggcggggaacgcgcgcgggtcgccctgctcaagctgatgctcgcgggttcaaacttcctgctgctcgacgagccgaccaaccatctcgacaccgcctcgcgcgaggcgctcgaggacaccttaaaggcctacggcggcacgatgtttatcatctcgcatgaccgttacttcatcaacaagctggccggcaaggtcattacgctgtcgcaaaacggcgcgagggaatatctcggcaattatgacaactacctggaaaaggcaaaagggttgccctcccccgcggtatcccctgcaaaggaagaaaagcccaagcagaacgaatacttccagcgtaaggaacagcaggcggcaaggcgcaggctccagacaaagctcaaaaattgcgaggcgctgattacacagcttgaaacacaggcaaaagggcttgaaaacgagcttaatcagcctgaaacggcctcggattttgaaaagcttacggagcttaccgcgcggcttgaaacccttcacagggaacaggagcggcagatggagctttgggaggagataagcctctcgcttgaggagtttgaaggggaagccttttgaaatatataaatcataaaaccagttttatttcaaaaaaagagggaaaccattcatacggtttccctccttttattcgtttgagcttactcaaaaaattcccttgaatactccacgacgccccgtataccgtgcagcccgttttccagcaattcaattgccataaaggattcgtccggaacctcaaacggcgcggagatatggtacctgcttgcgggcacatagccaaacttcgggtaatacccggcatggccgagcacaatagagcccttgtagccgagcgcggccgcaatgctgtgcccctcccggataagcttaccgccaactccctggttctgcgcgtccggtaaaacggagagcggagccagcgccagcagcgtatggccggagaccttcacctctgtaaagagaatatggccggcaagccttcctccgtcctgtaccgcgacgagtgaaagctgcgggacaaacgctgggcttttgcgcaggcggataacaagctcctgttcgtcaggcgccggacagtcgtccgctgtaaacgcggccttgaccagatcgtaaacatgctcgtaatcgctgatggtttcctgtctgatcgtaatattcatcataaacgtctcctttccgagcgggtcttgtttacagtgtaccacacttttcctgcgtttgtcatgagaaatttatcccaatcgcacggaaatttacgcaaagaaagaaaaaacggcacggatttactccgtgccggtaattttacgcatttattatccctttacaagtcccgagacgacctttgcgatgttctcgctgcaaaggccgaattctctcagcagctccttcgcggggccggaatggccgtagcagtcgttcacgccgattttcgtaaccggaacggggcacgcctcgctcgtgacggcacaaacgctgtcgccgagcccgccaatgatattatgctcttccaccgtgacaatccggcctgtttcctttgcggccttgatgataatgtcgcggtcgatgggcttgatggtatggatgttaataagccgcgcttgaatgccctgcccttcaagctcgcgtacggcggcaagcgcttcgcttacaacaaggcctgtcgcgactacggtaatatcatcaccttcgtgcagggtaataccctttccgattttaaattcatagctgccgtcagggtcgttgaagctgtcgattgccagcctcccaaggcggatatacacgggaccctggtgctctgccgccgctttgacggcctctatcatttcgtaatggtcggcggggttcagcaccaccatgccgggaatcgtcttcattaaggcaatatcctcacagcactggtgtgtcgcgccgtcctctccgacggaaatgcccgcgtgcgagccgatgattttgacgttcagcttcgggtagccgatggaattgcgcacctgctcaaacgccctgcccgtagagaacatggcaaacgacgcggcgaacgggattttcccgcaggcggcaaggccggcggccacgcccatcatattgcattccgcgatgccgcagtcgacaaaccggtcggggaacgccttctggaaaattgaggtttttgtcgccgcggccaggtcagcgtcgagcacgacgatatccttgttcgttttagcaagctcgcttaccgccatgccaaagctttccctggtcgctttattgattactcccgccatcacgcattcgcctccaattcctttaaagcggcttcaagctccgccattgctttgttgtactgttcttcgttcggggccgtaccgtgccagccaacctggttttccataaaggaaacgcccttgcccttgactgtttccgccaggattgcggtgggcttgcccttcacggccttcgcctgttcaaaggcttcctctatctgggtaaagcagtggccgcatattttaataacatggaaaccgaaggattcaaactttttatcgagcggctcgattccgcctacctctgcaaccgggccgtcgatttgcaggccgttgcagtcgacgataacgcacaggttgtcaagctcatgatgtgccgcgaacatagcggcctcccagacctggccttcctcgcattcaccgtcgccgagcagcgtataaacccgataatccttttggtcaagctttccggcaagtgccatgccgcacgccgcggagataccctgcccgagcgagccggaactcatatcgatgccgggcgtacccttcatatcgggatggccctggagcatagcgcccacgtgcctgagcttctcaagttcatcgaacgcaaaatagcctttgagcgcgagcaccgcgtaaaggcttgggcagcaatggccttttgaaagaacaaagcggtccctgtccggttttttggggtcctgcgggtctacgttcatttccttaaaataaaggtaggtataaaggtcggccgcagacaaggagccgcccggatggcctgactttgcatgataggtgccgataacggcgcccattctcgcctgacaggcaagctttttgagcgtaagcttttctgtactgttcattttattcgtcctttccctgtaagaagtcacatgtggaagcaggcgttgcgccgctgtgttctcgcggaaccggaattccgcaaccgttcccataatatcatagataggttgtgctatttttcatctgaagcaaaaaaacactttaaaatgacaaaataagttgcgtgggccgtgtaatcttgatataatcaggtagttaaaggaggcgcgtttcatgctgttggtactcgatgtcgggaacaccaatatcaaaatggggatttataacggaaaaaagctggaattccaggcgaggctttcaaccgaccggtttaaaaccgaggatgaatacgccgtggaattcgattcgattttccgtgtatacaatgtgccggtcaaagagattgacggtgtgattataggcagcgtcgtcccgcagattacgggccacctgagaaatgccttgcgtacgcttacgggcgtagggcccgtgctggtcggccccggcgtaaagacggggctcaatattaaaatcaataacccggcgactatgggagcggaccttgtggcaagcggcgtggcggcggcgaagctttacccctgcccctgcatcatctttaccctcggtacggcgacgacgatttccgttatcgatgcagacaaggcgtttgccggcgggtgtattatgccgggcgtgagtatttcgctcaacgctctgacggcaaagagcgccttgctttcggctattgggctggaggcgccagagcgagttatcggcaaaaataccgaggactgtatgaaaagcggcgtcgtgctcggcacggcggcaatgctcgacggcatgtgcgagcgcatagaagaggagcttggaagcccttgcagtacagttgcgacgggcggcctggcaaacgtgattgtcccgagctgcaaacgcaggattgatttgcgcgacgacctgattttggaaggcctgcgcatcatatataacaggaatatcatttaacaggaggaaagtgggtaggatatgaaatttcagcttgcgctgctctcggtcaaagacgtggaggtttccaaaaggttttacggggagctgttcggccagacggtcacgctcgaccttggcaggaacgtgacattcagcggcggctttgccatccagcaggattttgcgtggctcacagggattgaagaggcgtccgttaaggagcaggcccataacatggagctgtatttcgaggaggacgatttcgacgcgtttttgcagaagctcagcgcatatgaagatgtgcgttatgtccatccgccgaaaaagcatgaatggcagcagcgtgttgtgcgcatctacgacccggatgggcatatgattgaaatcggggaatcaatgcaggtcatagcaaggcggtaccttgcacagggtttttccgcggaagagacgtcaaaactcatccagcacccagttgcgtttgtaaaagcctgcctttgaattagcgggtatttgcttcaaactgaataaacgcctgtgcgggcggcaaacgcgcacctgtcagaattggttataatccccacagcgggttataataaataaagtttgcgccgcatccacagtgagcggcagcaggaggaatgtagtatgacacaggtaaaaagacttacgaatttgcagcggatggttttcatcgcggtgctcgcggctatcatcgtatttttgatgctgacaaacctcgggtatatcccgacagggtttggcttcactatcacgattttgatgattccagtggcaatcggagcaattcttttaggtcccgcggcgggcgcagccctaggcgccgttttcgggctgacgagccttgcgacctgcttcttgggcatggacccttttggagtggcacttctggccatatccccatggaagaccgcgcttgtatgcattgtgccgagggtattggtcggctttttgtgcggctggattttccgggcgcttcgcagggttgacaaaacaaaaatcatatcttacggtgtggcgagtgtaagcgcagcgctgctcaacacagcgctgtttttgacgggaatttggcttgctttcggcagcgaccctgccgtgacgcagtatacgggcggttcgtcaaacctgtttatcgtgattggcgtgctcggcggtatcaacgccattgtagaagctgtcgcgtgcctggttctcggtacggcgattgcgaaaacgcttgatgtcgttatgagcaaatcgcgtatgtaatagaatataatctgtccggcgggcgggaggttcccgtccgccgcctttttatctggaaaggatgcaggataagatgaaagaggaaattctgcggatgctgaaggaatcaggagactatgtatccgggcaggagctgtccgaacggctccatgtttcacgcagcgccgtatggaagcacatcaaagcgctcaaagaagagggatacgtaattgattctgtcaccaaccggggttatctgctaaaaagcataccggagctgtggaatgaacagcaggtgcaagaaaacctgaaaacgctccggctaggacgcgagcttttgattctccgtgatgtggacagcaccaacgaagaattgaagaggcgcgcgcgcacgggcgccgcgcatgggcttgtctgcgtggcggaaaagcagggcgccggcaagggaaggctaggacgcgcatggagctcgcccgcggggacaggcatgtggatgagcgttctgctgcggcccgatatatcgccgtttgaggtctccggtattacgctcgccgcggggcttgccgtatgcaaagcggtacaagggcttaccgggtgtgctgcgaaaataaagtggccgaacgacgtggtaatcggcaggaaaaaaatctgcggtatattaacggagatgtcggcggagtccgaccgcgtcgattttgtggtcgtgggaatcggtataaatgtaaatacagacagtttccctgacgcgataacgcataaggcgacttcacttaaaattgaaacgggcaaacccttcagccgcacacttttgctgtgcgaggtgctcaggcagcttgaaatttatacggatgaatttttactcaatacctgcgggagcattacgggcgaatataaggaaaactgcgttacaatcggcagggaggtttccgccgttcgcggcggcgtgcaggtgatgggcaaggcggttgatgtcacgctgtccggcgcgcttgttatccggcagaaaaacgggaagcttacagaaattaattccggtgaggttgtcgtacagggaatttattgataaattttatatttccaacatatgtttatatatgttggaaatttttttatatattttgttgacaaaagctggatattaagttattgtattgatataaaataatatttttattattataaaattttacaaaagtatcagcgaccatatttaccaaggtaatttaggaatggcgccgctgacccgcctgaagctgaccgtcgtaacgccagatggaaaaacctataggtcaaccagcatgacggggaatgtacagctggtttccctgcctgaaccagtgctcggaacctatcatatctatattgaccgaatgaacgagttttggcaaacaaccgatttttcggtggctgttttgaacggagatgtattgtcatgagtaaaaaaattaaacgctttctatgtgtcctctttgcttttctgctgtgtactggcgctttctgctttccggcaagcgccatagaagatgaagacaggccctggtttcctaatcaaactgtacttgcaaaattcggaacctcccgtggctatgacctcggcatttatgtagttcattcagcgcctgcgcaatcattggtaaaaatcgggccgtactgctttagctgcgaatactattatccggaattggtcggagtatatgcgtataagggcgacgaaatccacacgctgcaggaggcataccagaatggcctggtgtatattcatgaaacggtcatccagctccgggcatatctcaaaagcggtatgcccggttacgacggcgtaccttattcctgctgcatttaccgttttggggatgcaaacctggatgagaaggtcaacctgcaggacgtgctgcttgttcaaaaggggattgcgggaatcatcgacctgaacgacgtgaaatattcaattggcggtctcggaagccccaagtcttattttcttggagattataatgacgacggggaagtaaacatggaggacgtcctatctatccaaaagtatattgcaaaatttgaaaaataaaacgaagtgaatttcaaacagccctcatttatccggcgcttttcttgccagacggatgggggctgtttttataaaaaagtttaaataacaggaaaatggtataatttcagcttttttcatctattcgatagttcccttttttctatgtgaaagatttttatttaatatagctatttatatattttttatcgtattttattgattttttagtgccatatttatataatggggctggcataaacaatgcctgattattagaaggaggattatgtatgaagaagagaagcatcaaatttttaagcgcgcttctgaccttcgcgctgctattgtcgatgctggggcttagcgtttcggcaaaaacgcaggacgaagaaacggctgataacgggattttatatggggacgtcaatactgacggtaaaatttctgttgccgacgttttaacagtccaaaagcatatggcgtccgtcattaccctgacgcagccgcaggctgccgcagcagacgtggacggcgataaacacattacgctgagggatgtgctgttggtacagaagtatctggcgaatgtgattgtgtcgttcccagtggaggaaactgataaagacgcatcctgggcgaagaataccatcacatacgaaattttcgtcaggagcttttacgacgcggacggtgacggaatcggtgatttccggggcgtcgccgaaaaagtggattatttaaaatcattgaacgtcggcaccgtttggctcatgccgattatggagtccacaacctaccacggatatgacgtggtagattaccagtcggtcaatcctgactatggcacgatggaagactttgaatatatgcttggggtgcttcacgacaacggcatccgggttattttggactttgtggcgaaccacacgtcctcttcaaacgcctggtttaaagaggcgcttgccgacaaagacagcaaataccgggattactattttatctcagaagaggaaaagactgaggatggctggaggaaggctgaaaacgggctttactactatggcctgtatgattccataatgccagaccttaactacgccaacaaaaacgtttgggaagacatgaaggcaaatgcgggcttctggctcgataagggcgtcgacggcttccggctcgacggtgcgaacaatattgacgaagacgccgccgttacacatgcctggtggcaggacttcaccacttatgtcaagtccaagaatcctgccgcgtttatcgtgggtgaaaactggattaccacaatgaaggagcttgccccgtattttgcggatatggactcttccttcaactttgacgcggcaaacctcattgaggaaatggcaaggggcgtacagaccgatattgtcaaacacctgaacgagggccacgcctattataaggaaagcgccaacacgactccttccgtgccgaaggtcacaaccgattctgtcatgataaacaaccacgacatggacaggattgcgtcgcgcgcaggcacaaaggagcaggcaaagcttgcggcggcactgcagtttacgctgccgggaactccctacatttattacggcgatgagctgggccagcttggtgaaaagccggacgacaaccgcagagagccgttcgactggtacgcttctgcccagggcgagggtatgacccagatgacgggcgacaagtggatgagcccgatgaagtataccctgccggacgacggcatctcttacgaagaggaaaaggacgacccgggcagcatttatagctattataaaaagctgacggatatcagggcgcagtaccctatgctctacacgggtgactacggcagcgttggcatgaacgacggcctgtattcctatacggtaagcgaagacggcgttggacagaggctctttgccgtacataacctgacgggagaggcaaaaaagcttaccttcgattatgacgccacagacctgatttccggtacaaaaatcgccgcgggcagtgagtttacgtttgctccttttgcatccgccgtctttgaatatacgggcggaaaaatccccgcgaagataccgtacaacccgccggtagaggctgaaactaaggagtatacgcttaccttcaagatgacgctcccggaaaacacgccggaggacgagccaatttatatggtcggcaccttcaacaattggacggtcgcggacccgctctatgagcttaagcgcacatccaaaacgacagcggaaattacaatcaagacagaaggtactgtgggcaagcagatgcagtacaaattcaaccgtggtacctgggacaagcgtgagcaggacgctgagggaaatgacctgataggcgacctccacaaggagaaccgctattatgagtttacaccgaatgctgtagatacaataagcggcacgattgaaaaatggtcggacattgactgaccgtgtttcaaacaaattgaattccggttaagaaagcgcccagtggaaatgccactgggcgcttctgctatgcttgatgctttttgctgccgtaaacaacgggatggcgaatggatgtgctcccgcgtggggagcgacagagatatttcaatgtgtatttacggattcggtatttcaatccacgctcccgcgtggggagcgacatgtgcacctcgccgcacagatgcggattatcaacatttcaatccacgctcccgcgtggggagcgacagcaaaagaagccaaagtaaaggagaatcgtctgtttatctttgtataaattctccaaatatcacttcttttttatattctatcatattattttataaattccaaccacaaattttggtgcgaacctcccggcaattctctgtttacttccacttcgcactttaaagctgctgtatggtatttataacttatggctttatattgttttctggtcacctaaaataaaaagggagaaagcacagcatgcgctctcccccttactcgcctactattctattgccgtcataccgtaacgggcggtgaatctgtagaaatgccggtcatctccggcatggagaacgcaacattcgtcgcgtggtctgcaatccgctccagatttgtgagcatatcgaggaataccggaccatcctctgcagtggcagcgccttcattcaggcgggctacatggtgctccttgtagagcttggtatcgtcgtcaaccttttcctctgtattaataatgacctgcgccatgctcatatcgtgcgaacgcgtagtgaacatatagatactgtcctcaagcacggaggtcaccatagcgcttaacagctccagctcctcaagcgcgctgggattcatgggaatattttgattcatcaggctctgtgcgcattccgtgatgttgacggcatggtcaccaatacgctccaagtcgctgatgacgctgtaaagcgagccaataacacgcctgtccttatcctcaatatcgagcccgtttatttttacgaggtattcggtgatgctgtgcgtcaggaaatcaacgacgcgctcgttttcctctaccttcaatatccgcttttcatcctgctcgaagaacgcgcgcagcgcatttttatagctctttacagcaaggtccgcgagacggtgggcttccttctgtacctgcgaaacagctacaggcggcgtcgtcaggatacgggaatccaggtaaagcggcgccattttttccttctcttcctcctgcccgggcataagaagctgcgcgagcctgacgagcaggtttgcaaatgggaacaggatgacggtaatcccgacattgaagatgatatgcacagcggaaatctgcgccgcgacattgccggggaagatatgctcgattgccgtaacaaagcctggacagagcattgtaaaaattacaaatatgattgcgccgagaaagcttatgataaagttgagcagcgcggtgcgctttgcgttacggttagcgccgatggaggaaagcgcagccgccatacaagcgccgatattgaaaccatatatgacgtaaaccgcattgggcagcgtgatggcgcttgcaaggccaagcgcctgcagcacgccgactgacgccgagctgctttggataatagcggtaaatattacaccggcaagcacgccgagcaggggattgctgaagtttgtcaggagagactggaactccggtgaggaggccagcggctgcatggaggttttcattgtagtcaagccaaaaaacaggataccaaagcccgctataatctgcccgtaatatttctggttgttctttttaaggaacataatcatcacaacgccgacaaaaataaacagcgggacgatgtcagcaatattgatagcaagcaggacgctcgttacagtcgtgccgatttttgcgcccatcaggataccgacggcttgtcctatttccataaagcccgcgttgacgaatccaacaaccattgcatccgtagccgacgagctttgaataatacctgtaactacaagcccgacaagcagcgcaagaaaacggttgctcgtcaaacgttcaagaaggcccctgagcttagcgcccgcagcgagctccaaaccgccgcccatcagcctcataccgaaaagaaacaaccccaggccgcccagcagcaggaatatatcatatatattcatttgtactcctccggattggttccgtcaccattccgtaacataaattttacccatgctttacaaactttttacacatacaaagttatgatagtacaaacaaaatcgaaaaatattaaaaaaaagaaaaataaggagaatcggctaaattctccttatcaatcaaaagtctatataaaaacgcataggtttttgtctttttgccgagaatttcaggcgctgtggacagcaagcctgtttttcagctttgcgcggtcgaaggcaaaggcaattaccaggaacacgacagcactgccggctgcctgcaccgcgttttccggaatgttctcaagcgcgccgccccagactacagggcttaaaaaagcgccgataaagccatcgcctgcggttgtcctgtcaattgcaagcagtacaacctttgtcaggtaatagcctgcgatggtaattatgcccgaggggacgaccatcattgcgttacgcatggtcaggaccctatccttccggcaggtaaacggcagcgctatcagcgctttgataataaatgtggggagcaggtacataaaatacccgccgaacaaatcggacagcgccccgcctattccggcggccagcatggcatacggggttggcaaaaagcaggccgcaaggtaaatgacagagtctcccagatggatatatccgccgcccggcgtgggaagctttacgaaataagtaagcgccgtcgtcatggccgcaaacatggcggcaagaaccagcagcctcagggttttatttgtatttgtcttcataagaagtcccttcctcattttttggatttataagcccgggaagttgtacaacaatcacgcgttgtcataatcttagcagacaactgaccatattaaaatgtacagttttgtaaaaaacaaaaggtacagttgtacttagtttactgaattggccttttttcagagtatataagcttatgccaattccaaaaagccgtatcccagtaattctgttttatcgttcaaaaaagaaaaaaagggaagcttaaagcttccctccatcctttattttaatggaaaaaccagcttcttccccgtgcctccctttctcttttttatacgccgaaacggcctggacagcacctttgcgcactccatcacaacgagcggcgcgacagaaagcagcccgacaatcccccactgtgccagggtcaggggcactgttttgaaaatagccccaagcggcgccatggtgataacgagcacctgcaaaagcgcgcatactataaacgccataaccattttccggttactaaaaaggccgatgcgaagaaccgaaccgtcgctgcgcatattaaacgcgtggacaagctctgaaaggctcaaaacggcaaatgccattgtcctgccgacggatacggcgccgggcacgtcgaaaaagcttcgccctattacaaacgaaagcagcgcaagcgcgcctatcatcatgccctcaaatgcaatatcgattccaagcccgcctgaaaacaggctttgcttctgcgcaataggcttgcgcttcataatatccgggtctaccttttctacaccgagcgccattgcgggcagcgcgtccgtcacaaggtttacccacaaaagttgtataggcagcagcggcgtagggagatgcattacagacgcggcaaatatgaccaggatttcgccgatattacaggaaagcaggaaatgaatagcccgctttatgttctcataaataccgcgtccctccgacacagcacgcacgattgtagcaaaattgtcatccgtcaatatcatatcagacgcaccttttgcaacgtccgtaccgcttttacccattgcgcagccgatatccgccgccttaagcgcaggcgcgtcgtttacaccgtcgccggtcatcgataccacctcgccgcgcgcctggaacgctttgacgatacgcaccttatgcgcaggcgaaacacgcgcgaatacgcggcaggtcgctatccttttttccagttccgtatcgttcaggcggtcaagctcctgtcctgtcatagactctgtctgcggcgttaggattcccagttcctttgcaatcgcgtttgcggtgatgacatggtctcccgttatcatgacaggtataattcccgcttcccggcaggttgaaaccgcgtgttttgcctcgcgccgcggcgggtctatcatacccaccagcccgcagaaggcaagcccggcttctgacgcttcttttacggatgaaagctccctgcaggccaccgcgattacacgcagtgaatccgccgccatttcatcgttcatgcggattaccgcaccgcgtttttgttctgtcatagcggtttgatgcccgcggacacgtatctgcgtgcagcttttaagcagtacgtccggcgcgccctttgtcacctgtatgtagcctccgcccggcatcctgtggacggtcgtcatcagcttgcgcgcagaatcaaacggtatctccattacccgcgggtactgccggtcaagctcatcctttgggtgcccttgtctggcgcttgcaagtaccaacgcattttccgtcggctcgccaagcgccttccatttaccgcttgcgccctctatacgcgcgttgttgcacagagcggaaaaggtcagaagctctgtggattccccgctgcttaaagcctgcggcccatccggcgtacagacctttgtaaccgtcatgcggttttgcgtgagcgtacccgttttatccgagcatatcacggtcgcgctgccaagcgtttccaccgcggggagcctgcgtataatcgcgttgctttttgccatgcgctgcacgcctatggaaagcacaatcgttacaattgcgggcagcccctccgggattgccgcgacggcaaggcttaccgaaagcataaagctgtcgagaaccggcacatgctcgagcatacccataataaaaataataccgcatatcacaagcgcgccgtagcccagtatacgtccggtttttgcaaggcggacctgcaaaggggtctgcggcgtttcttcgttgttaatcatatgggcgatatggccgacctgcgtatccatcccggtttgcgtgacggcggcggtcgcgtgtccgcttgtaataacgctcattgcaaaaaccatattacgccggtctccaatcgccgctttttccggcagcctcagcccgtcctctttttccaccggaacggattcgccggtcagggaggattcctccgcttttaaatttgtacaggtaatcagccttgcgtcggctggtacaaggtctcccgtctccagaaaaagaatgtcgcccggcacaagctcctcagtcggcacggtaacacgcatcccctgccgcagcaccttagcgttcggggcagacagctttttcagcgcgtctattgcgcgttccgccttgttttcctgtgcaaccccgataattgcatttacaataacaatcagcaaaataataaccgggtcaaccatgtccccgtcgccgctccaaatgcttgtaaaaaacgaaatacccgctgcgaacagcaggacgattaccataaaatcggaaaattgctcgaaaaatttgcgtggaaggctttttttctttccctcctccagctggttctttccgtactgttccagccgcctgcgcgcctgtgcggagcttaatcccttcccggcatccgtattgagctcccgtaaggcttccgccgctgtttttgtatgccaagccatttttcttcacctcatgtccgggcctgcgccgaaacagcatacatcccgtcttttctttccatattactgttcttgtttccggttctaactcatttatatgcttttcaccggcggcaaatgcaaacatgtccgaataaaagcttttgccccacattttaacgggaatttgctttgtctaaagaaattttttaccgaccagggtttgacacactcaattaaaagtagtactgttttgttgaagaaatactaaattatcaaatatttctatacccaacatcttaaaaacaaaaaaggagagagaaccatgaaaacaacgaaaaaaattttatcggtaatcctaacgatgctgctgctctcagccgcattgccagtggcagctgctgtgcgggcggacgaaaacagtgaggcgtcattccatgaccttgcagagctggaagctgtcattgaatccctgtataatgggaactatccggaaatcgcgcagaaaatcaaagaaatgcgcggcggctcctttgcagaaatggcagacgaagtccttacgctttactatggcagctgtggccccacaagcattgcgttccagaaggttttaatcgataaccatatttatgccgaaacacggatggactcgcagatgtatccggcgcatgaatataacctcatgcgtgcgcggtttacagacggtacggtaaagtttgttctgttcgacggcgcgtacaggcagtttatgcgcaattattttaaggcaaaaattgcggaggatactggaacacagccctacgaagtaaccgacagccaggtggatgaggcaatactggcagcaaacctgccgaatgtacttatttttgatttcagcaataaagatgaggcggtcggtaaaataaaagcggcgctcggggaagccgcagacgcaagcgcctacgattggattgaacgcgagtatgaaagccaggcctatccggagccggcgctgcagacgattcatacgcgttacctgacggacgcggacgtacaaaggcttgaaacgggaattcccttcggcaagccatttgaaagcgcgctgtacctgcgtggctcctgggataactatactacccgcagggaattcaaatatatgggcaacggcgtttaccagctcgatttgatatatcccggtacagaagggagtgccggaatgtttaccgtgcgcattgaagacgggaacggcggatttatctacggaacaacggagtccgacgccatttatccgactatgaaaacaacgtacaaccacaccaccaggcaatggtttttaaccggcagccctgacagcagcgccgatattccgattgataccaacagcggcagcgttacgctgagactcgatacaagagccggcatcgacgccccgcactttcgcatgcttcacctcggtgagtctggaatatacggcgacatcaattacgacagaaaaatagatattgccgacgttttaaaaatgcgcaacgcgctttccggtttaatcaacctgaattctacggagctttttctatgcgacgtcaacgacgacggacgctttacagaggaagatatgctgcttgtccagaaatatatagccctttgccctgaaaccgggcgcgtcggtgagaaggcatatatgcccgtcgaataaccagcgcacctaaaaaagccagccagaatgttctctggctggctttttatttcatataaagcaaagaaaagtcgtttcctgtcgaaaaataagtaaaatcaaaaaatatacacaatacatttatatactatttgtaacaattttttcttgaatttataattaaaattatatataataataaccgatagatagtatgctatttcccattaaagaaaggacggtccctgtatgaaaaaaacaaaaaaaacagcaagggttcttctctctatctgtatggcggttcttttatgcttaagcgcatttaccatggccggcgctgtagacgagccaccggcagcgcgttccatctattatgacaattattacaccgaatgggctgacgtgtactgctatgcatggaatgcaggcggcgaatacaatgccgcatggcccggtgaacccatgactctgacagacggttcctgttacaacattgatgtagacgccgcctttacaaaagtcattttcaccaacggcgcgggcgcgcagaccttcgaccttgaccttttggcaaaatacgacacgttctttggcaacaatacgtcagagagcaaggtaaacggtttctggctcaaccagagcaattacagcaagatttatttctccccggcagacttttggggcgaggatgactgctatgtatcgttctggggaaccaatatcccgcagagctggcccggccttaagatggacaggccttccggaacagccgcagcagcttacattcccacagccatgataagcaatataattatcaataacggcggcaacggcaagcagacggaaacgctcaccacaccgcttaccaccaacagcatcggcctcaccggcgaaattatcgggcaggaccagtacggaaacgacatctatgaagtcaagttcaatgagcctggtccgggctgaccgttatttaaatccccggtaagaatctcaaggaacaagtaaatcaatagcatactatcctgacttattacatgcgtaacgagaggggctttccacagcaggaaggcccctcttttacgcctgcagggcacacagtaaaaacctcctctgtacttgacagtacaaaggaggttttccattttaataatgctatttacttcttgccggagtacagaacgcctgcggggcgctggtcttaggcggttccagaatattgattccaacgccgtcgccgtatgcgtcataccatatcacataatagagcgcgtcttcatcctgtagaaatatgatatcgtcgtatacaataaggccctgctgtttatcgtaatacgccttgtctgccggcccagccgcatggctctgcgctatagatacgtgtgcaagcgttttaaagtaatcttgataataatcttttatctcttgttttgaaagcaaggtctgaaatttggcgccattgattttataatagcccgcggaccatgttttctgcggggcggggattattccgccgcagcccgtttcatatcccttgctgttgttatgaattcccatgtaaacagaaaatgatactagcgccgcaagcaaaacagagcagcacgcaatcaaaattccctttaccgttttatgcttcatgatttgtcaccgctttcagatatttcttatgtcttcccttccatatggattccctgtgccgctgccatatgggccgtatattattcatacccgcccatattgaagttaaatcagcccgacaaaccgggggttgccttttagataagccgggattgtatcattctattgataaacccaactgatatgcttcctctaaagcatctgtttttttaatatcccccttgtcttttactcctcgcacaaatatcatcccaatatcttttaaatgaaagaaatcaagtatgagctgatattgtaattttaccgcatcaaatagctctggcaatgttgccgcccctaccagcagcaatgcaagcttttgtattttgaaatcacttcttaatggggtgtgcagcctgtcaatcactgctttcaattgcgcactgatgccataaaaatacacaggagacgctgccacaacaatatctgccgttttcaatttatcatatatctcgttcatatcatcatcttgaaagcaccgatttccctctctcgtaaaacacgaattacaaccgatacaaggattaactttataatctgcaacagaaactacttcaactgtattattcttggatgcacccttaacaaacgcctgcgccaataaatccgtattgccgttttttctcatactgccaatcaaaaccacaattgtactcataaaagggcctccaaattctgatttgccgtttacgccttattagccaaaggtgtgtttatttacattctaaagctgcaccttataaaagtcaaatttagaacggcatagttaaaccctattatttgttcttacaaacctgagcaacagttttccgtgataaaaaagatagcttttcaatcctgtggacatcggttggaacagggcggataccgccctgtttttcgtaaaacaaaggcttccggggataaatcccggaagcctttaaataccatattaaaatgctttgccttatttcagcccttcgtaaacggcaaccgcgcaggcgaccgtcgcgccgaccatggggttattgcccatgccaatcaggcccatcatttccacgtgggccggcacggaagaggaacccgcaaactgcgcgtcgccgtgcatgcggcccattgagtcggtcagtccgtaagacgcggggcccgcgcccatgttatcgggatggagcgtacggcctgtgccgccgccgctggcgacagagaagtacttcttgccgttttcctgcgcccatttcttatatgtgccggcaacaagatgctggaagcgcgtcgggttggtcgagttgcccgtgatggaaacgtctacaccttcgtgtgccatgatttctacgccctcacggacgtcgttggccccgtagcactttaccgcagccctctcgccgtcggagaacgctttttcttccacgattttgagctcgccggtgaaataatcgtagtcagtcttcacataagtaaagccgttgattcttgaaataatgtaggcggcatccttgccaaggccgtttaagataacgcgaagcggctctttccttgctttgttcgccgtccttgcaatgccgatagcgccttcggcggcggcaaagctttcgtgtcccgcgaggaacgcaaagcactttgtctcgtccctcaggagcattgcgccaaggtttccgtggccgagcccaacgtttctctgctccgcaacggaaccgggaatgcagaatgcctcaaggccgataccaatggcttccgccgcctccgcagcattctttgcgccctttttgattgcaaccgcgcagccgagcgtatacgcccaggacgcgttttcaaacgcgatgggctgaacgcccttcacgattttgtcgggatcaaagcctttgctcaggcagagttccctggcctcttcaagacttgcaataccaaattcggcaaggcacttctcaattttagccattcttctttctttaccttcaaaattcacgttgttagccataaatgaagttcctcccttgccttattcttcacgggggtcaatatatttggccgcaccgtcgaagcggccgtactgaccgatgttgtttttatatgcctcatccgggcttgcgccgtggcggatgtcttcgagcattttgccgagcttgacaaactggtagccgatgacctcgtcgttctcatcgagtgcagttttaaggacgtagccctctgccatctccatgaaacggacgcccttagcctttgtactgaacattgttccaacctgggaacgcaggcccttaccgagatcctcaagccctgcgccgatgggcaggcctccctcggagaacgccgtctggcttctgccgtaggcgagctgcaaaaacaggtttttcatcgcaacgttgattgcgtcgcagacaaggtctgtgttgaggcattcgagcagtgttttcccgggcaggatttccgccgccatcgccgcggaatgcgtcatgccggagcagccgattgtctcgacgagcgcctcttccacaataccgtcctttacattgagcgtaagcttgcaggcgccctgctgcggcgcacaccagccgatgccgtgtgaaaggccggaaatgtctttgatgtcataggatttcacccattttccttcctcgggaatgggcgcgggtccatggtgcgggcccttagctacagtacacatattttccacttcatgggaataattcataagggtactcctttcgcattggtataggtatggcagatttgcgggataataaaacatcttatgcagacctgcgttgtacaattcttaattataagcgctttacgcctgccttgcaagggatttcaagcagaattcaaaaatttttgataattttttgtcaaataaaggcggtgcatcccaatgggtgcgccgccttttcaaaagctattgttttttcataatatgtccgtcgccgcttaccgtgttcattttaattttcgcggcgccgttattatagatagaatcgtctccctggtttactatggggaaatcacagcggagcttacccgaaattgaagagaaattcgcggtgaatccctctccttccggaatagtcagggaaacgtccccgctggtcgtactcatttctacctgctgcgggaaggtatcggactccacctccagctcgcctgaaacgctgccgcccgtaaaatatttcatgccctttacgttagcgcggacttctccgctggtagtgttcgcctttatttccgtaaacctgccgaacaagttaatttctcccgaagtactggaggcttccgccttttccacagctacgccttcagtttgaaggtcgccagaggtcgattccagcctcagctcggtaaaattacactgcgttgcgtctgcttcgccagtaacggtatgaagctttgccttctgcgctgtcatccccttcacggtaatatcggcggacgtactgtcgacagtaagaccagaaagtttttccgccagctcctgcggcaccttgactgccagccgtttactcggaacgttccaggaaattacgcttttgacatatcttatcttgagtgtcgagccgcttatctcgtaagcaagcttatattgatcctcaagctccttgcgggcactttcctcaaaagatattttatcgccggtgtaaggctcaatctcggtactgcccaccgtccaattgatttctatcgtatcgacattcgcagcatcgacctcatatttccccattaccgagtactccccggtaccgaaatctataatattgatgccgaatcccttaaaccatcctccggtcaggcccgataccaaaattccaatcaataaaagcgctacgacgctccagcagacaatcgcaacaaccgtccctgttttcaccccgtttttcatgtcgtctcctccgttaattctttttcaggttaaagcacaggctgataatctgtgcagccgccatcaaaaacgccgcggcactccagcaggcgattgcagcaaccgtccctgttttttccctacttttcatatagcttcctccgttatttcttctttaggttaaagcataagctgataatctgtgttaccgctactgcaactagaaaaatcagccacgtaatatgccacgcgctcgtaaagaagctgatgacaaggtacagcataaccgtaatgctccaaagcgccccgttaatagatttcagcacgccgttgtcatgctgctttacagactgccattccttgaaatcctctaccatcgtcgcgttcattttaacgtatttcggttttgtcatggaattgaaaataagcaggcccgtcgctgcggcaatcattacgaacatcaggataggcccaagcatcatgccctcgattgaagcgctgcttgtactgaaaataatgggcgggatgacgcacaggatgtagagcataaccgcaacggaaatgagcaccgcgctgcgcgccttgtacttctgcatctgctgttccatattgctgtcgcctcccgccctgttttcctccaaaaggatacttacgtcgccaatactggaaattgcaatgctgtaagcggtttcctcgtccctgccctcggtaatgaggtcataatacttctccgtcagattacggagcatttcttccttgatttcttgtaccctgacgctctgcgccacgccgccgaacagcgtatcgatatggtttctaagccttgtgttgatatccatgtttatccctccgtctgaatcagtctgtcaatgagccgctttgcgttctcccagtcctttgcaagagaactgtatgtttctctcccaagcggcgtaatcgaataataccgtcgtcttgctccgatattttcgtcgccccaataggaacggatacaaccgttttgctccagcctgcggaacgcggtataaagtgttgcttccttcagctcatactttccgtcagtcctctcctgaatcgatttgttaatccggtagccgtaactgtcgccgttaatcaggtttgccagaataatggtatccgtatggcctctaatcaggtcggatgctatcgacaacgccttcacccccttctcctttgccgccgcgccctggcacagcctgcagggggttgagtctctaacggacttacttcccctattgcatctatataatatcaatatatacttcgcctgtcaaggtatatattaaattttttctaaaaaacccaacagggcgcacagcacagaatgccgtacgccccattgggtttggttttggtgttaaaaggatggatggtgggtataagtaagatagttgtaagtaaggttaatcattacttccgctttaaggaaacaggttccttcggttggcagaagccctgtgctgaagctgttcctgcggctgactttgcggccttgagtgcaagcttcgccacaaaacgttcagccttgtttgcttttttcattggtaacccctcctttttctttgtgagtataattcacacagcatcgctgctgagacaatatcaagcacaagcggcagcataaacgcctgccgtactcctgttattaaaagcaccacagccgccgccgcaatccctgcgtaaacggcaattgcctttctccggcagtcttttctctgagctgcgctaagcggtttgtttttatgcgcaaccggagaacatttcaatatgattcctccgctgagcagcagagatatcacagctgccgtccacattgccgatgtaacggacacaagccattggtaaagcaaggcacaagccaagaatgttccaacataaagcgtgttgcaccgcaggtacgtatagcagtggtacccgcccgtataggaacgaagcgcggtaaatgcaacgaaaaacagcaggccctcccaaagcatggaaaagacaaggctcagtgtaagaattaaaaggataccaagcgcagaagaaagcacaagctccactccataaacgtaaacatccagctcttctttttcaaagcagcgcttgcttaacaaaaaaaatgctatagcttctgacaacttatgcagcatgaatattcctctttgctgtgtctttcgttgtctatactatagcagatttatcactatttgtgaagagttttggtaagtttggtcgttatttcggtaagtttggtattggtaatactatgccaacacaaaacaacccgtctttttcggtaaaatgtacctctcctttatatttttttacagtcttctccaggctcttcgttccaatgccgtgcattgccttgtcgctttttgtcgtgtgaagccttggattggattttaaaactgacttttcaatggtgtttttcacgacaatagaccggtacgctcccttacgctcaaaagctaccttgattctgcggttatcctccggcagctttgctaccgcctctaccgcgttgtcaagcacattcccgagcatgatacacaggtctgtatccgctacatcctcgaacgcttctgtaacaaaaacctgtgtgtcgatatatttctcattcgcctgcgacagctttacatttactatcgcgttgagcatactgtttttcgtattgataaatgtcccggtgctctgctgcacctcgtcctcacacgcgccgcacattttcagggcgttatccatatccccattttttataaactgcccgattacaagcagtttgttcttcatgtcgtggcggattgcggagatgctctccatacttttattcgcctgcaggatattttcgttttgatatttgtactgctgctgcaacagcttatactgcagctcaaattcgctgtccttgctgattttaatcagcataatccatattaataccgttataactaatatcccaatcgcaacaaatcccaaaaacagggaatgctcccttgtaaggtttgtttcaagggaaattgcatagattaaaaccaatataacaatagacaaaagcggaattacaataaatgccgtccagtcggtccacttcatgatgttgaatttataatgcttaaagcgcagagtcagcaagtaaaacacaacataaagggcgttgataagaatcatacagatgaaacggtagactgagcttgaagccatcagctcatacatagacacaccggatatactgctgaccagaaaggcgacagacgcgctgataccatatgttccgcagtaagaaaaaacaggcacgaaaattttagacatgaccgttccctttaagcatgtaaagcaatagatgatttgaaggaaaaccagtacataaatttccaggccgttaaatacctcataaaaataatttactgaggtgattgctataatttctgccccagaagcaacagcaaggcaagtcaggccttttttgtcctcgaatttactgcccaaaaatttatagcaaaaaaacatgaagatgaaaccttggaatacgtttacagccaactcgaacacgttccataaaacaacgtcattcatcttcaaaaaccctttccttaatgaatctgtcctttattgccttatatcggttgcggctgattgggatgctgtccccgttgtccatcaccaagctgcttttatttacctgataaacatgatccatattgacaagaaagctggcatgaattcggataaaaccatacgacgtcagctcgctctcctttttataaacactttcccgtgtttcaagcttgccctttgtcgtcacatatgtcatggtattccccatgttttccagataaacaatgtcagacatataaattttggcatagcctcccttatgcttgaccgtcagctttatttcattggttgatttatttttcaggatatacgaaaccatatccggcaggtcccggtcgagatggctttttctcaggaagccagccggatggctgtcgagcgcttcaaatacaaggtcgtcacggttagtggtaaagacgattatataattctcttcgctgtccttgagctgttctgctatttctattccgtttaaacccggcatctcaatgtctagaaaaattacttcatacagggaggaacgcacatcgtctaacagggactggccatccccgaacaggataatttctatggtctcctccggcaaaaagcttgtaaacagcatcttaagcttattctttaagctttccgcgaaaacccgttcatcgtcacaaaccgcgatacgcacaaccattcactcctcttccacgacatgctgcctcattcacacggacgattccaatattttctatcatatcagaaaattttgcatttttcaatgatatagctaattttatttattatgatatgacaaggttcgacaaattccccatataaaatgcgtcaccaaaataggacaagcggcatagtatagaaggagctgaaaagctctgaactcaaaaaaggaggacaaagcctatcgaatcattcaaactctcttccgataacggcttttcatgcgtgctgagcgtcgtgctcagtctcgtttttgccgctgccacgggcgtgctatattatatgacgtaccttccaaatatcatcacagcagttataattgcgctcgcccttgccggattgattctgctgctggccggtgcaggctgtcttttctctcccccggggctcagatactgtaccggaaaaacggcgggctgcctgctgctcggtatcctgggcacagttctgacaggaaccggcgccctggcaacgacgcttaatgtaagctcggccatagatatcgttctgatttccttcggcgcgtttttctttgggcttatgcttctttccttcctgcaatatttaaggtacgtctcaatgagccaaacaaatctccgataaaccaggcacaaaccatccttcccttattaaatgctgttacccccctgaaagcaaaaggcgggcgcggatgatgaatcatccgcgcccgcccatgtttattttttgacggccgctttgaccgtatgctttgtttttggatgctcagtccccgtttgccgttcgtgcagcttttcccttgcgaccgcaagcatcagcttaatgcggttttcctggttaacacgcggcgcgcccgggtcataatcgattgcaacaatgttcgcacggtcatctatactcttgattttgcgtatcatgcccttgccgcagatatggttcggcaggcagccgaacggctgggtacatacgatgttctcatagccggtttcagtaagctccagcatttcggcggtcaagagccacccctcgcccattttgctgccgtacccaataacgcccttgacaagctcctttgtatgggcatattttccgggcgggataaagccgtatttcgcagtgctttcaatcataagcgtttccatcttgactaaataatcgaacaaaatctttaccacattaaattttatcctgctgccgccgtagagcttaatgtcctccaggcggttgtcgaccttaaacagggcaaagcccataatccccggtacacatacctcacagtcctggtcggccaaaaactgttccaggttgttgttgcccagccgcgcatactttacataaatttcgccgacgatgccgacctttaccttcggcgtagatttgtcgagctgaatctgggaaaatgactccgcgatattgtcaaggatattcttctgctcctttatggtaaagccgctgccgtttttaaatttttccgtcagcgtcttaatccatgaatcgacaagcgccatgctttctcccttgttgacctcatacggctttgtctggttgctcaggagcatgagcgtgtctccgtatacaagcgcgccgattaaacggcgtatcatcgggacggacagcgaaaaaccgctgtttttctcaaggcccgacagattgagcgaaatgacgggaacctgttcgaagcccgctttgcgaagcgccttcctgagcaggtggatatagtttgacgcgcggcagccgccgccggtctgcgtaatgattaaagctgttttattcaaatcgtatttgccgctttgcagcgcgtggatgaactggccgatgacaagcagcgccgggtagcacgtgtcgttgtgcacgtatttcaagccaacctgcgcaatttcagggccttcggtgtctaaaagcacagtattgtagccgtacatgccgaacacgttgttcatcagcttgaactggatgggcgccatcatcggaagcaaaatggtgtagtcctttttcatttccttcgtaaaaagcaggcgtcccgttttgtcgtaaactaattgagccattgtattccttccttgcatcaaatccgcgcgtcctgatatcagcggatttttattttctgtcctctctctgctccgcaatcgcggcgagcaggctgcggattctgattttcaccgcgccgaggttcgtaatttcgtcaattttaatctgggtataaatcttgccctcgctctcgaggatttccctgacctcgtccgttgtgattgcgtctaccccgcagccgaacgaaacgagctgcaccaggttcatgtcgtcgcggccggcaatgtactttgcagccgcatacaggcgtgaatggtaagtccactggtttaagacagatgtacggaacttctttacacggcagctcacgacgtcctccgaaatgattgcgcagtggaagcttgtaatgagcttatcgattcccttgttgatttcagggtctacatggtacggcctgccggaaaggacaataatttccctgccctctttttcggcctgctccataatcgtttccccgcgcgtgcgcaccttcttaaagtattcgccgtattcgctgtaagccgccttggcagccgctttgacttccttcagggtaatgccgtcaaaatatttacagagcatctcgtgcgccttgaccggaaaatccttatggcggtggatgccaaggtaatccttgataaacgtaatatttttaacgtccttcatgttcgcggagatgacctcagggtaatacgcgacgaccgggcagttatagtggttgtcccccagcccctcgtccaaattataggaaaggcagggatagaaaaccgtctgtacgccgtcgtcgataagcgcctgcacatgcccatgcatcagcttagcgggataacacaccgtatcggacgggatagtctgctgtccgcgcgcgtaaagctttttgtcggaaacaggcgaatatacgacctcaaagccaagcgccgtgaaaaagctgtgccagaacggaagcagctcgtacatgttaagccccatcgggatgccgattttgccgcgcgggccgggcttcggcttatacgactgcaaaagctccagcttgtaatcgtagatatcgagcgttttatccggcgtttttttcgtaatcgggcgttcgcagcggttaccgccgataaatctcctgccgtcagagaatttattgactgtcaggcggcagttgttgctgcaaagcccacagttaacgacctgtatttcatgtgtaaaggtcttgagcgcttccctgtcgagcagcgtgctcttcccgcccttacatctggatttcgcgtatagcgccgctccgtacgcgcccatcagtccggcaatagtcggcctgacgacctccacgcccatttcgcgctcgaaggcgcgaagaaccgcgtcgttcaaaaatgtgccgccctgcacaacgatatggctgccgagctccttcgggcttgaggcgcggataaccttatacagcgcgttcttaacgacgctgatggaaagccccgccgagatatcctcaatcgttgcgccgtccttctgcgcctgcttgactgagctgttcataaacaccgtacagcgcgaacctaaatcgaccggctgcttggcaagcagcccaagctttgaaaaatcctcaatcgaatagcccagcgcgtttgcaaacgtctgcaaaaacgagccgcagccagaggaacaggcctcgttcaaaaagatgttgtcgatggtgccgttgtgtattttaaagcatttaatgtcctgtccgccgatgtcgataacaaattccacctgcggcataaagctctttgccgccgtaaaatgcgcgacagtctcgactataccgaaatccgcgcagaacgcgtttttgatgatttcctcaccgtagccagtaacagccgaggacgcaatgtcaatctccgggcaaagctcataaagctcctctaaaaactgcttgataatcgggacggggttgccgctgttcgggagatatttggagtaaagcagctcgccgttttcccccatcacgacagacttgaccgtagtggaaccggcatccatgccaatatataccctgcccttataatccttaatctcttttttaggcacatacgccatttcatggcgctctttaaattgctcgtagtccgccttgctttcaaaaagcggcgggttgaacgcgaagttgccgctgccgctgtaatgctcgacctttttgacgaccgcgttaaaatcgattactttttccgcacagagcgccgcgcccgccgcaacatagtacagcgagttttccgggcagactccttccgtatgcagcaccttgtcaaaccgcaggcgcagcctgggcataaaggtgagcgggccgcccaggtaaacgacctttcccgtaatttccctgccctgcgcaaggccggcgaccgtctggtttacgacggcggcgaatatgctctccgcaacgtcgctttttctcgcgccctggtttaaaagcggctgaatatccgttttcgcaaacacgccgcagcgcgaagcaatggtgtacgtcttttcatgctgcgctgccaaatcgttcatctcttcgagcggaacgttcagcagcgtggccatctggtcgataaaagcgcccgtgccgcctgcacaggagccgttcatcctgacctccatgccgcctgaaaggaaaaggattttcgcgtcctctcctccaagctcaatgataacgtctgtgccggggataaaggtgttcgccgccacgcgcgtggcgtatacctcctggataaagtcaagcccgcagctgtccgccacgcccatgccggcagagcctgagagcgccacaagcgcgctgtcgcttcccgggacctcttttcttaccgtatttaaaatatccgcaattttttgtgtaatctgcgagtaatgccgttcatatgttttataaaccagctcgttcttctcatcaagcaccacgcattttaccgtggttgagccgatatccaatccaatcctcaagcgtacgacctcctaataaagctatctagatattatataatagaaaaacagtcgtttaattctaaattcaacacaaaaaatacacgtcaaaaaattaacagcctgttaaaaaatagaagcatgcggttcttttcctcgttagttataacataccgcttgccccatgtaaagtgtaaatatgtggggcgccgcgcaaaaaaagaggctaaggccggtttttaaaaccggaccccgcctcaaatttgtataatctatgattagtagcagcgcatggaataagaatccgggatatagcgccccgtgctgcttaaatagtccttcaatgtcgtaaccgtaccgccccaggggtttgctatcaggatatccccgctgcctaagccgccctttttcgcggctgcggcaacaccgattaccgttacccagtggtcactggagcttaacgtattaatcagggaaggctttccgtccatcagctcgctgtaagccctgctgagcttggaggaggcggagcagttatagtaccgcctggaggcaagcccccatcccgcgccggcacccgtccagataatctgcgagcttgtcggcgtaatttttttgccatacaggacagatgcccctatggcctcggccgttgcgctgcacccgacgttcgtgccgccctggttgaatttgccgtagtccctctggtcataaaggtatgcggtggaatagccctttgggacaagatatgttttatttttgtaaaggatttccttgaggtttttcgagctggtgtttgccgtcacggtataatcgtaagagaaaatgacctttgcacttgtctgcaccgtatcagctgcgagcacctcgagcttctgcttgccgatacccgcgcggctgaaataaatcaggtcgtcgaataccgggttaatatcataggattttatatttttacccttgtcgagcttgaccgtcttggtcatattcgtgccgctgattctcacgcaaacggaagtaagcggataattcgacttgactacgccctttaagggaaatgttttatcgaccgcaattgaatttcccgacattttctgaaagccggagaaggtaatcgaggatttcgccattaccgtaacttcacatactgcggattgaccgcccgcttttgccgtaatcgttgctttacccggagaaatcgccgtaacaaggccgctttcgtttacggtggccgccttctcattgctggaggaaaatacaacctgattatatgcatcggccggcgtaaccgccgcgttcagggtaatcttactgccaacatatatggacgcgccgagcttatcgagcttaatgtccgcaacctcggggagcgtctcttcctgtccaggcgccaggtccatggacgcaagccgcttctgcatggctgtaacgtcctgtaccgttactgtcccatcgtttgagaagcccgctgcgatgatttgctcctttgtcaggatatgtacttttgccaggtgcttctgcacggcgagcacatccatcagggaaagcttaccatccccgtcgatatcccccgctgcgaattcatccgtaacggcgcccgcctggctgctgtcaatatctgcggcatttgcgcttatgggaaaagtactgaaaagcagtacggcgcttaatgtgaatgccgcgcctcttctcgtaatcttcataagtgaaatggtctcctttttgtttcattttggtacgttccaaattgtaacaaaaagattacagaaagtcaaccatttgtaacaaatagattacaacattgtgcatcccgctacagatttttaactataagctcaggttttcatgcgcattacagtaaaaaagaggagatttatgtaaaaaattatattttttgtttcaaaaagtaaaaatcagccaaactcagcatggctgatacgcattgcgtcactcatgctttttcttattacggatatgtatcatggccaggaccgttccggaaataaaaaaggctacggcaagaaaaagcaggctccatattgctattttattgccgagcgtccccccgtttccctgccagaccgaccagtcgaaataggcgcgcagctgaaaaagaaagtcttccaattccaaaaaaccgttgcccaagctgttgatgacagggacagaaaccgctacgagcgcaaaaacggcagacgttttataaagcgcgtttattttgaggtaacgaataatcagcataatcatccagcacggaatcagggataatgtcgcaacaggaagcgcaatttcataaaaccaggggccgcgttccagcaggtagcacacgaagagcagaagataggtgcctgccgtaacacagctgctgacaatcaaggtattgtgctttttgagcagcagcggcaaattagtcagggaaaaaccaattgcggcagacaccagcacaataaagaaccacgagagcttgtggtcgaccgctaaattgcagataaaacaggtaatcagcgcggccgtatagcttacgtacataacccactgataaatcttttttgctttacggtagctttttgcctgcctcctttcttcccttgccgccaggtcgtcgcacgcagtaaaaaattcatgctccgtaatttgcagctctttacagatagcgggaatcagcgtgatgtccggatacgagattccccgctcccattttgacacggccgtatcagaaacaaacagccgcccggcaagctccttttgcgtatatccagccgcttttcttttttgtgtaataaaatctgcgaatatcttcttattctccatacaaagcacccttcttacttgtttttctttatcatctgacaaaggggcaaaaaagtcaataaaaaagcctgattttacggctcgaccggtaagccagccggataataagccgctttatggcaggttttacataaataaaaagcaggcatagaaacctccatgcctgcgaattttaccatataccgaatctgtttacctgtctccgataccaacgtacggacgtctttcctgcacattcatatatgccggacggatgattttgctcgggttcacaagctcctcgatgcggtgcgcgctccagcccgcgattctcgcaatcgcaaacagcggggtaaagagttccttgggcaaatcgagcatgctgtaaacaaagccgctgtagaagtccacgttcgcgctgactcccttatatatcttgcgctcttcagcaataatcctgccggcaatcttcgcaacgttcgaatagagcatgaactcgtcttcccttcccttttccttggaaaggctctcgacgaaatgcttgaacacgcgtgccctcgggtcggaaagcgagtaaatcgcatggcccataccgtagaccaggccggacttgtcaaacgcttccttatgtaaaatcttgcggacgtacgctgcaatttcttcctcgtccgcatagtccttgacatgcgccttgatgtcctcgaacatctgcacaaccttaatattcgcgccgccgtgcttcgggcccttcagggaaccgagcgccgccgcgatggtggaataggtgtctgtaccggaggatgagacgacatgcgtagtaaaggtcgagttgttaccgccgccgtgctccgcatggagaacgagcgccatatcgagaagcttcgcttccagatgcgtatacttgctgtcgggacgcagcatataaaggatattttccgctgtcgacagctcgggctgcggcgtatggataatcaggcttttgtcctcgtgataatagccgtacgcctgaaagccgtagaccgacagtatcgggaacagggaaatcagctgcaggcactggcgcagcacgttcggaatggaggtatcctccggattctcgtcataggaataaagcgtcagcacgcttcttgccatcgcgttcatgatatccttactcggcgatttcataataatatcgcgcacaaagcttgtcggcagcgtgcggtaatagtcgagcagggaagtaaatttcttgagctcctcctgcttcggcagcttgccgaacaggagcaggtatgtaacctcttcaaagccgaagcggtcgtccttgataaaaccggagacaatctgttccacgtcgtagcccctgtaaaaaagcttgccgtctacaggcacgcgcttgccgtcgacaatttccgtcgagcatacctcagatatttccgtcaaacccgtcaggacgccctgcccgtttaagtcgcgcaggcccctcttgacgtcatatttcgtataaagcgttgggtcaatcgtgctgtttgccctgcaaagctcactgagctccaacacctccggggaaatttcactaaatttgtttttgttctgcattgctgctcactccttcctgaaaacatgaggaaaatgcttccgcaaaaagccaatgattaaaaatgcttttgattattatacatgatttcagggaaaaaaacaattcttttccctcggcaattgtgaataatccgtgaataattcctgcaaaattcagacagcgtcctgaatcagcttatattcgatggattccgtcaaagcaaggcggctggcctcaacgacgtcagcggaaacgccgaccgtcgtccatacgcggctgccgtcggttgaggtaatcagaaccctcgtgaccgcggcggtcgcctgcttggaatccataacccttaccttatagtcgattaaccgcatctttttcagcgtcggatagaatacctcgagcgccgcgcgcagcgccctgtccagcgcgttgattggaccgttcccctcggcggccatgagctggtccttgtcgcctacccgtattttcacggttgcggtcgcgctgaaatcctgctcgcaggggcggccggtcacgattttatagttgttcatctcaaaaaacggcttgtatgcgcctaaatttttgcggatgagcatttcaaagctgctgtctgcggcttcaaactgataaccctcctgctcaagctgcttgagctcttttaatatttttgctgtttgcgggctgtcctttgtaatactggggtcgattttcctgattttttctaaaatctgcgtcctgccggagatttccgacattaaaaaacgccgctcgtttccgaccgcttccggcgatacatgttcaaatgaacgcgacagcttaagcaccccgtccgcgtgcatccctgccttgtgcgcaaacgcgctgattccgacgaagggctcgttctttttaatagaaacatttgatatttctgcaattttacgcgccgtttccgtcagacgcgggagatttgcctgcggaatgcacgcaaccccgcaggcaagctggaggttcgggataacggtggagaggttcgcgttgccgcagcgctccccaaagcccaggaaagtcccctgcacctgcacggcgcccgcctgaacagccatgacggaattggcaaccgccatccccctgtcgttatgcgtatggatgcccaccttgcccggaaaacgcttacaaacctctttaacgatttcatcaatctcatttggcaggcacccgccgtttgtatcgcacagcacaagccggccggctcccgctttctcggccgcctcaagcgctttcatcgcaaactgtgggtcgtccttatagccgtcaaaaaaatgctccgcgtcgaaaaatacggttttgccctgttcctttaaataacggcaggtgtcggaaatcatgcggaaattttcttccgccgtggtagacagaatctccttcacatgcaaaaaccagcatttcccgaagaccgcgaccgcctttgtccctgcgtttataagcgcctctaaattcgtatcgtccgcagcgttacagtttttgcgccgtgtgctgccaaaggctacaagctgcgcgtgcttcaaatcaagctgatgcgcgcgctcaaaaaattccaaatcctttgggttggagccgggattcccggcctcgatatatggaacgcccagctcgtcgagcgctttgacgatgccgagcttatcttcaactgagaaggaaacgccctctccctgcgcgccgtcgcgcagcgtggaatcgaacagttcaacggttaaagccatcgtattcagtcctttcttgctgtttaccagagcgtcaatatcatatcctccggcgtttttccgggcggaatcatcggcagaacattttcatcaggggaaatatggcagtcgatgacgaccggcgcgttcaagctgtacgccttttcaagcgcgggcaagacgtcctgctggcgggttaccgtcattccttccacgccgtacgctttcgcgagcgccgcgaaatcagtcgcgcggtgcgggtcagtctcggaaaaacggttcccatagaagagcttctgccactggcgcaccatgccgagtacgctgttgttcataatcacgacggcaaccggcagccggtacgatttgagcgtgacaagctcgttgcagttcatatggaagctgccgtcgcctgtaatcagcgtaacgcgttccttcggatgcgccgtctgcgcgcctatcgcggcgcccatgccaaagcccatcgtcccaagcccgccggaggtcaaaaacgtgcgcggccgttcaaacctacattcctgcgccgtccacatctggtgctggcctacatccgttacaatgatatcccctggctttttcatactgtttaccgtacgcaggatatgctgcggcgtcggaaccccgtccccatacgctacaacaggcggccgctcgtttttccacagcgtaacctgctcaagccaaccgctgtgcgcctgctgcggcaggacttcgttcagccgttttaaaatatcctttaaatcgccgcagagatggcagcttgtttttacgtttttatcgatttccttttcatcgatgtcaatatggatgatttccgcattctcacggaaacgctcgcggtcgcccgcgaccctatcggaaaagcgcgcgccgagcgcgataatcaaatcggcgttttgcgtcgccattccgctttcatacatgccgtgcatgccgatattgccgaaaaaaagcggatggcgcgcgtcgataccgccaagccccatcagggaacaaaatacaggcgcgtcgcaaagctcagcaaattttgtaagctcccgcgcggcttgtgcccctatcacgccgccgcccgcgtaaagcatgggtcgttttgctttttgtatcagcctaaccgcagcttctatttgtatcttgtcaggggaggcggttttattttcatacgttatgcccgttttaacatattccgttttcagcgccgtaatatcctttggcacatcgacgagcaccgggcccttcctgcccgtgcgcgcaatctcaaacgccttgcggatggtgggcgcgagctcttccatctccatgacctggaagcttgcctttgtcacaggctttacgatatctttgatattgacctcctggaagctgtcgcgcccaagcaggtcgcgcgacacattgcccgtgattgccaccatcggggatgagtccatataggccgacgcaattcccgtcaccaggttcgtggcgcccggaccggacgtcgcaaatacgacgccggtctttcccgttgcacgggaatagccgtccgcggcgtgcgccgcgccctgctcgtgcgccgtcatcgtatgatgtatcctatccctgtacaggtacagcgcgtcgtaaatgttgagcaccgcgccgccggggtatccgaacacctcctggacggcctgctccagcaggcattccgctataatttccgctcctgttagctccatatcaaatcaccttttccctatttattgcttatccataccgtcagaaaaataaaaaagcctccgtctttttacaaagacgaaagctggcttcgcggtaccactctgtttgccccaaaaagaggccccttatcagcatcgggccaatgggccgaatgctttcccgtataacggcgggtgccggtcgcgcttacccaaaagcttcagcggactgctcaagggtgattttcttcacggatacggcgccgcctcacaccaaacggcggctctctgaagccgaagctccggaatactcttccctgtcccagcatttctggtaattaaattgttaataatattctatacacgtaaaactgttttgtcaatacgttttttattttcttttccagaaaatcagagcgcctgatttttggcataatggtatcattagaagaatccaaaagggggcatcgctcatgcagcagcaaaagctttcggaacatgccgtatttatctggcgtatacgcgcaaccgcactgatggttctcgcttcattcttatgcggcgcggtatgggttttcagcgtggggctcgccattattttaggggcgctgagcctgcttgtgtatctgctgttgatgttcgcctattttccatggctctaccggaaatgcttttttattttggaaaaggacgcggttatcattgaaaagggcgtatttgtacacaaacgctttaaaatccccgtgacgaggattcaatacacagagtatctgcaaacaccggcccagcgtatcaagcgcgtctactccgctgtattccatacggcaggttctatggtcatgcttaaccaaatcagtgaaaaaaacgtgatgaaaatcaagcggcttacaggcgacagctccgttacaggaagaaaacggctttaaaaacgcattctatgtaaccgctgatatataaaggaaagggggggcgtgccgtgccggatgataaaaaagtacgcaggaaaaagaaaacctacctcagggcgcacccctacaccatccttacttatctctccaggtttacatacctgctgattattccgcttttgcagcacctgcttttccagccgcagacactcgctgaaacaatcgcttccttcggtgtgaatatcctgttcgttttgctgcttatctttgccgccgccggggaataccggagtattgtctaccggtataacgcgaagggcatttacctgcggcacggatggttcgtaaagcgcacggctaacgttcccgccaagtgcatccagtccgtttctatccagaaaaacatttttcccgcgctgttcggcgcggtcaaggtgcacatcgacacgcccggcgcaatccggaataaaagcgatatcagcctgattctctcacgccggaaaacaaggcacgttatcgaccgtatttttgaagaggacgacgtgactgttttatacaaaagctctttcctgcgcattctcgtaatggccgccacgtggtcgaactccattacagggctgctgattttcgcaccgtttatcagccgggccggtacggtactcggcgaagaattcagcgcaaagctgtacgagggcattaacctgggcgtctatcttgcggcaatcggcctgccgcccgcggcggcatatatcgcgggcatcctggtgtttggctatgtcgtcgcttattttgtacaggtatttcggtacggccggttttccgtatcgcgcacaggcgggcgcgtgattataaaccgcggccttttgagccgcaatacctttgttacagaaacggagcatatcaacgccgtctccgcgcgccaaagtctcctgatgcttttgttccgcctgaaaagcgtctacatccatacgataggctccggcaaggcaaagggcgacaaaagccttttgattgccgcgcagagcagcaaaaccatcgaccgcgtgcttatgcggttaagcggccggacacttaatttccagcagggcatcacgccgccgaagcgcaaagcaataagctttctctttctgcccatggtctgtatcctgtgcgtaattcccgccgcctttcttttaaatgtactggggctgtacggggaaatactcatgcttatactcctgttcggtgttcccgtccttttcctttggctgggctttcgctattttgcatacaaaaagaccgccctggcctttaacggcaaagcggtcatggcttgcggatataaaagaatgaaccttactcaaaacgcggtcccatttgaaaaggtacagtacctcgccgtaagtcaaagcctgtttcagaaattctctgacagctgccatgtaacggtttatatctattccgaccaccggcatggcttcacggtcaaaaatctcgattacaaggaagcatgcggtacggttgaaaaaatcgagtcgctcatcagggaagcctctcaaaaaatgctgaaatgattctcgcggcagactgcgcggcatgcattttaaaagtaaaataatcctccgcactgttttcatccatgctgtcggatatgctgcgtaaaattgcaaacggcgtgccgttcaaacggcaggcctgggcaattgcgccgccctccatctcgcaggcgtcggcctcaaacatctcatggatttgagcccttgcctccggcttcgatataaaccggtccccggtcgcaatcctgcccgtaaccgcgttatcgattccaaggaaggaacacgcctgcataagcgccccggcaagctccctgccgcacgggatttccaccatgctttctttcccaatattcagaagcccgggcctgtccccgaactcggttgtatccatatcgtactggacaacgtcacgtgctacgacaatatccccggttttaagcccgcggcgcagcgcgcccgcaacgccgcaattgatgactgcgtccggtttataacgcagtatcatcgtctgcgcgcaaaccgccgcgttgaccttaccgatgccgcactgcgcgacgacgcatttcttcccgtggagctttcccgtaataaaggaaattccggaaatctccgcctcctttttatcttccgccatattgataagcatctcgacctcttcgctgagcgcgccgatgattccaatcatattgatattcccctttcagtcaaaatttcccgtaacaaacattaaaacggacaatgccgcaagcggagccgtttccgcacgtaatatccgttttccaagcgttgcggcacagcctcccgcgtcaagcacctgctgtacctcggaagcggcaaagccgccctcgctgccgataaaaacagcgagcgtttcagcctgttcccgtacgatttcccgtacaggctgtccgccgcactcgtaaaagataacgctgcgcccggacgtcttcgcatcggttaccgcttctttaaaggaaagcgcgcccaaaacctcggggataacccccctgtgggactgctgcgccgcctgggacgcaattttctgccaccgctgtaccttttttaaaagcgatttttcatcgggacgtgaaacgcaccggctcgaaataaccggtactatcctgtaaacgccgagctctacggccttctgcacaatcaaatccattttatcgcccttgggcagcgcctggtaaagcgtaattttcacgctcggctcgttttggcacggaaagttttcaagcacctgtacatccacgctgtcaggattgatatctttgattacacacctgtgttcaacgccctgccggtcgcataacgtaagctcctcaccgcgggccatccgcagggattttacaatatgccgcgcgtcctccccggtaatacggtgtatgccgccgtttatgctgtctgtaaaaaaccatgacataatactgcctccatgtgattcatccgtacctaatatagcagagaaaccgcctctttgcaaacgcgcttcttgtggaaaacggcaaaatttccggcttttgttgacaaatacgattcttctgttaagatgttacatgttttacgaaaagaggttttttgtatgacaattgaggatttttatgaaatattaaaaaaagaatcgatagaagacgattccctgccggagctgctcgtcacagcgctttcccataaaggcctgcatgttgcttcggctgaaagctgtacgggcggattaatctccgcgcggataaccggggtttctggctcgtctcatgtgttcgactgcggagtgtgctcctactcaaaccatataaaggaacagctgcttcatgtatcgggcgaaacgcttagaacccatggcgccgtttctgaacagaccgcacagcaaatggcgcggggtgcgcgcgcgcttgcaaaggctgacattggtatttccactaccggcattgcgggtccaacgggcggcacgcgggataagcccgtcggccttgtctatattggctgctgtaccgaacgggatacgcaggtaatcaaagcgcagcttgacggcggcggaaagtacggccgtgcacaaatcagaaaggcggcctcctccatcgctctttaccttgcgctcaaggcggcgcgggcgttagattgaattttaccgcttttccattatgaagaaggacaggcctccgcaaatgcgcgcgcatcggcaaaatacctattgcttcgcaatcgtttttatgctaaactgtaaacttgacggcagattggcagagtatgcctgccgccggcatttcctatcattctaacggacggaaacaatcgggccgaacgctgcccggacgtattatcaatttcatatttgaaagattggagttggtcctatggcaaggtgcgcaggcattttaatgccgattacctcgcttccctccccctatggcatcggctctcttggaaaagacgcgtacgatttcgcggacttcctgaaagctgccggccaaaaaatctggcagatactccctgtaggccccacaagctacggcgattcgccgtaccagtcgttttccacttacgcgggcaacccgtatatgattgatctcgacacgcttgtcggggaagggcttttaaatcgggatgaaattgcggaccgtgactggggcagcgacccggaaacggtcgattatgaaaaaatctacaacgcgcggttcgacgtgctatactccgccttttcccagttcggtaagatagcgggcgacaaggaacgcaaggcgtttgacacgtttatcaaggaaaacgccgaatggcttccaaattacgcgctttatatggcaattaaaaaagggttcaacatgcgctcatggctcgaatggccggatgaagacatccgcatgcgcaaacaaaaagccgtagagcaatatcaggaaaagtacgcgtatgaaatccgcttttggatgttcgtccagtttaaattctttgaacagtggacgagactgaaggaatacgtcaactcgcttggtatttcgattctcggcgacattccgatttacgtcgcgatggacagcgccgacacctgggcaaaccccgaggttttctggctcgacaaggacaggcaccctgtctgcgtagccggatgcccgcccgactacttctccgccacagggcagctctggggcaacccgctatacgactggtcgtatttaaagaaaacgaaatatgactggtggttcaagcgcatcgccggcatttcaaagttattcgatattacaagaatcgaccatttcaggggcttcgattcctactacgccataccatatccggcggaaaacgcgattaacgggcagtggctcgagggtcccggcattaagttctttgagctgatgaaaaagaagctcggcgatattccaattgtcgcggaagacctgggctttttgacggacagtgtattcaagctgcttaaggattcaggctatcccggcatgaaggtgctggaatttgcgtttgacagcacagaagaaaacaattacctgccgcacaactacacgaacaacagcgtggtttactccggcacgcacgacaacgacaccatcatgggctggtttgaaacagcccagcagaaggacgtggactttgcggtcaactactgcaacctgtccaaggaagagggctatcactggggtatcatccgcacggcgtaccagagcgtaagcgattacgcgattatacagctgcaggatatcctggggctcggcagtgaggcaaggatgaacatcccctccacgctgggtggaaactgggtttggagaatcaagcgcggcgccctcaccaaggaagtagcatatagattaaggaaattgtctaagacatacggtagactggaggatgacgaattaatggatcagaacaacattatggagaatcttattcagacggccaagaacgcctattgcaagaaggtggaggagcttacccccgccgagctgcacatggcccttggcaaagcgatgatgggcgagattgccgacagatgggagcagagcaaggaaacccacgcaaacgcgcgcagggcttattacttttcagcggagttcctgatgggccgcatgatgtacaacaacctgtactgcatggggattctcgacgacgtcaagcagatgctcaaggacaggggcgttgacatcaacgtatttgaggatgtcgacgacgcggcgctcggcaacggcggccttggaaggcttgccgcctgcttccttgacagcgcggctacgcagaacgtaccgctcgacggctatggcatccgctacaagtacggcctgttcaagcagctgattgaaaacggcttccaggtagaggtcgcggacgactggcagcatttcggcgatccgtggtgcattcgcagggaagaggacatggtgcaggtcaggtacgccgaccaggtggtcaacgccgtcccctacgacatggcggttatcggctacggtaccgacaacatcaacacgctcaggctgtggcaggcggaggcggttcacgactttgacttccttgcctttaatgacagcaaatataacgaagcggtcgcggaaaagaacgcggcggaaaacatcagcaaggtgctttacccgaacgacaacagctatgagggcaaggtgctccgtttaaagcagcagtatttcttctgcagcgcttcgcttcaggatatcattaagagatacaagaaaaagaacggcggcgactacagcaaatttgcgcagcactgcgcaatccagctcaacgacacacatcccgtgtgcgccatccccgagcttatccgcctgcttcaggccgacggccttaccttcgaccaggcatttgacattgcacagaagacgttcgcctataccaaccacaccgttatggctgaggctcttgaaaaatggagcatcgacctgatgaagagcgtcatccctgagatttacgccattattgagaaaatcgatgcgcgtctcgtcaaggatttgacggcgaagggcctgaatgttcctgccctgcagcagccgaaggttgaggaagaagaggccgaagcggatgaaaaggacgcaaaaacggaaaagaagcctgcgcctgtacgcatgaagctcgacgatatgagaattatcgacggcggcgtcgtgcatatggcaaggcttgcgatatacgcctccagctttacaaacggcgttgcatggattcacaccgaaattctcaagaacgacgtactcaaggactggtacgccatctatccggagcgtttccagaacaaaacgaacggtatcacacagcgccgctggctggggctgtgcaacccgcagctttctaagttcattaccgaccgcatcggcgacggctggctcagggacctcgacgagctcaaaaaacttgacggtatgattgacgacaagaccattgccgaattcaatgaaatcaaggccgagaagaaggcggagcttgccgcttacatgaagcgccacgacaacttcgacgtcgacccttcctttatcttcgacatccaggtcaagcgcctgcacgagtataagaggcagcttttgaacgcgttctccatcatggatatctacttcaagctcaagagcggcgagctcaaaaactggaacccgacagcgttcatcttcggcgcgaaggcagctccgggctacgcaagggcgaaggccatcatcaagtttatcaacgagattgcaaagcttgtcaacaacgatcctgacaccaaggataaactgagggtcatgttcgtttcaaactataacgtctcctacgcggagaagcttacgccggcggccgacatctcggagcagatttccacggccggcacggaagcatccggcacaggcaacatgaagtttatgctcaacggtgcggttacgctcggcacctacgacggcgcaaatgtagaaatcgcgcagcaggccggtgaagagaacgagtatatcttcggcgcaagggtggaggacattaaccgccttgcaaaggaaggctacgacccgaaaaagctttacgagtcgaaccccgggcttaaaaaggtcatcgacacgctcattgacggcacgttcgacgacggcggcaagacgggtgagggcagcttcaaggagctgcatgaatctctgattaacggtgcctcctggcacgcagccgaccactactacctgctttatgacctgccgctctatgtagaagccaaaatcaaggcaaacaacgactacagcgacagaaccgcgttcggcagaaagtgccttgaaaacgttgcgaatgccggacagttttcttccgacaggacaattctccagtacgcaaaagagctctggaaactccagtaatcatataccaattacatttttacggcgggacacatagtgtcccgccgtatttttgtctttcttctattgtagagtgtgtataaatttcacttgttattttcaggaaataatgttacaatatttacaaacaaatttaattttaaggtattgagaaaggattgaatcatttgaaaaaaataattgcggtattactttcagtaattctctttttgtcgctctgtcctgttgtgccggctatggctgaatcagttgaggacacacactttatcagcggggattacgtttgtattaaaaacggcgacggaaccgtttcacttctccgttatcagggaaaagaagataaaatcttgattccaaacgaaattgagggcttaagagtaactgaaattctatcaaactgctttttcatgacctctgcgtccagtattactatccccaacggcgtaaccgaaattggtttagcggcatttggcgattccagcactctaaccagtatcgccatgccagacagtttaacgtttatttctgcatctgctttttacaattgtaaaaacttaaaaactatcgtcttttctaaaaatctttcttatgtcgggctgaatgctttcaacaataccgcctggtatgacagccagcccaacggcgccgtctatatcagcaaggttttctacgattacaagggagatatgccgaaaaacacaaagcttgccttaaaagacggtacggtatccatttcccagcaggccttcagagactgtataaacctggccggaatcacactgcccacaagcctgaaagaaatcggaagcgcggcgttctccggctgcaccggactgaaaagtattattatccctgagggcgtaaataaattggaaagcgcagtttttcaaaaatgtgttaatcttgagaatatcacaattcccgacagtgttaccgatatgcagtcccctaacctggaagataccaaatggtttaaaaaccagaaagatactttagtttatgctgggcgttatgcttaccgatataacggaagcatgcctgcaaacaccacaattaagctacgtgaagataccataggattaggaaccggcgtattctccggatgtgaaaaccttaccggcatagtcattccgtctggtgttacaacaattaccagcagcgcctttcaggggtgtaccggtcttaaagagtgtaatttttcgaaaaatgtaacggaaatacaaaatgaagcttttgccggatgcgaaagcctgtccaaaaccagcccgcttgagcaggttaaaaccattggtgagggggcattcaagcgatgtacttccctgacaagcgttgttcttcctaatgtactaatctccttaggaagagaatccttttacggatgtacttccttagaaagcatttcccttcctgacaggcttaccagcatagaattcggaacatttagcttctgttcctcgcttagtaaaatagaattcccatatgctgtccgttatatttccgattatgcctttatggggtgctcaagccttcaagctatatcttttccagagtatttgttagatatcggagaaagtgcctttaatcagtgtagtgctcttgagcagattaaattgccgcgggatttgcagaggattggagcaaacgctttttttgattgcaaaaagctgaagaatgttttatttcctggtgacaacactgaaataggggattacgcatttggattttatcaggcggtcagtgaatacggagataattatattgaaaaagatagtgatttctttatgtctggaaaggacggctctgccgcgcagcaatacgcgcaggaacacgcgattcccttcactgtgctggattctacggtaatctccggcgatgtagacggcaatggggaaatcaatacggccgacgtgcttatgattcaaaagcacctgtcaaaaatcatagagcttaacgaagaacaaaaagccgctgcagacacggacggcaacggcaaaatagaaatgaacgacgtgctgcagatacaaaaattcctggcaaaaataattgacgtgctttaagcttcccacatagtaaagagccccaaaccgctgaggttttggggctctttttactcttttgtctgtttttctgaaaggaccatcattcgttcatcgatacggattcgattttcatagcttagcttcctgtagcgcgcaaccaggttcgcctctgccggcgtaagctgttcaatcgaataagggttttcaatgtcggagacgcctaccaggtaatcaaggctaaccccgaaaatttttgccagcgtaatcaatgtatcaattcccggctgtgtcagccccttttcatactttgaaatcgcgctcgacctcaggttcagcttttgtgccagttgtgtttgattgtgtccacttttcatgcgctgttctttcagtctttcggctaaattcatttggaagctcccctatgccttttattcaataaggttacatttaaaattataacaccgaataattaaaattaaatatttctatcttattcggtattatttcctctgaattttttaaataggagaatttattcatctttaaaagacaaaatcacccttataattccctttttcttctatttttattataccggcttacgcgggcaaactaccagtataagaagattccccttactttttgtttaagataatattaaaaagcgccatgtacgaaacgtacatggcgcccagtaaagcttaataattattcataacagaaatacataccctcacggtaatcgtagataccactgccctgtacaaacccagcctgatagatgacgctttccggtacataacgcgtgccttcaagaattttctttgcatttgcatagcaccggtcaatcgcctgcttggtccaggaatcgtttgccttcggcaggcttactcccgtccagcccatcgtaccgtatgcgccgggtctcgtaatgacgccgcgtatggtattggggaaattcggatgggcaacatggttcattacgacgctgccgaccatcagctgaagcttatcgctgcaataaagcgcgccagcctcctggtaaataactgccgcaaggcagaacaagtcgtcatccgtatagctctttttcacggtaaccttgcacgtagcctttgccccgttaccatccttcgccgtgcaggtgatggttgccgttccagcgcctactgctttgagcttgccgtttttgtccacggtagcaaccttcgtgttgctcgacttccagctgaccgacttattggctgcgttagaaggggaaaccgtcgctttaaaggttcccgattttccgacattccaactaattgcggaggtattcagcttgatgctcttaaccggctggtaaaccgttaccttgcaggttgcctttttcccgctgccgtccttcgccgtgcaggtgatggttaccgtgccggcgcctactgctttgagcttgccgtttttatccacggtagcaacttttgtgttgctggaactccatgcaagcgatttatttgtcgcatcagagggggaaactgtcggcttataagttccctgccttccaaccggccatttaattgaataagtgtttaaagcaaccttgctcaccggcttgtaaatttcgaccttgcaagtattggaggcgagcttctctcctgtgcttttagcagacacggtacatgtaaccgtagcggtgccggggcctaccgccttcagcttgccatttgcgtctattgtcgcgattttcgtattgctcgacgtccatgtgatttttttagcgcccagcacattgctggaaattttcgctttatagctgcccgttttgcctaccggccatttcagtgcatagcagttgagtgatacgtctgtcttttcatcgttcaccttgataacacactgatcggccgctttaaccggcatgttcttttccaccgagcaggtaacggttgcggtccctgcggaaacggcggtaattacaccgttctggttgaccctgaccacctttgggtcgctcgatttccattccaggttgtttgcctttacgcctgcgggcagtgccgccgtaccaaccgggcgcgacgtgccttttgttaaaacatacgtatcctgcgcaagctttaccgtgttattcatcgtttgagccgataccggaatacagccaaggctgcaagccagaaggcacaaacataaaattacagaaattgttttcttcatcataacaaaagctgagagattgcctctcccattcactcctttttgactctgaatttgctgcgctgtaacgcaacgattcatagtttacaatattattacaaatttgtaaagttctgatacttttgttaaaatccggatttttccctgattttctggattttcgccccattttttaacaaaaggaaccaataacatattacaatctcgtaatctatatgtgcaaatggtcaatttttccacacaatcatctcgtgtacattttttacataaaaataataatttatttttaaaaacagtatatatcgttcatttttttaaattttacctgtttttttattttaagaccatcaaaaaagttttttgaaataataaaaaaaactcctgtggaacctcttttccacaggagtttttacaaaacgattacagtaaaacggcaattccgcgctgtttcttcagtttcctaaaatcacggatagcttaacggaacccttcgaattatcaaggtcataatccgcgccatcctctatcgtgacacgaatctcataaatcttttcctgcgataagctttgcgtcttatccacctccctgccggtttcgtccgtcagcttccattgctttgcctgtgaaaagcttccatcaggccgttttataaaaaggcggagccgctccgccgtaccggaaagcccattgacccggtatgccagaactgtaggttcaaaaatgttttccgccacagccgtatgcagaaaggacgcaggctcgagctgtgttcccgtcacctgctggaacttgctctttgtaaaccgggcgcgctccatccggtccatatcaaggcggacgaattccttttccggcagataggcaaacctgtcctgcagcctaagcagctccatattatttgtgggaacatacagggagttcccgttattgccctgcatcatgccgacagccatattgttgtagcgcggcaaatcggaaaccggcgcttccattacggttttacccgtttcccagtcgagcgccaggaacttccagataccgtcatcctcctgcgtatatccatagagatagccggtcgaggtagaaagcttgaacatagaggtatcgcagaggtcttcccgcgtccataccgtcttcatcgaatatgacccatcccttttgaccgtatctatccgctcgattcccggcatcaggtttttactgccgtttgcaatccagttcgcatcgtaaagattgtcataggtctgtaccgaagaatcggcgcccttctcaaacaatccggcattgcccgcgccgtaccagttgcagaccagcgcggatacgctgtctgtaccggcggaatatacaataatggaattttcgaccgaagccgtaatatcctttatgctttcaaacaccggctgttgcgccacggtttttcccgttttgatatcaagggcaatcaaattgacgggattttgattatctgtaaacaaaaccagctcctcggaaagcgtcggtgtggagccgccgccccaggcaagccccgcgcctgtaatcccgctgcccttttgcgcgcccttgcctccgtcggactgatatccggtacgccagacaattttcactccgtcctgtgaagcgttcagtaaatagcacgctttgtttgtcaggatagtacagccctccggatgagaggaaattccgttttccgcgccctccccgtcctttagccggtaaaaatgaagggattctttggcgtccgccttttctccggacagcgccgcgtcgatatacgacctgtcaagataaccgaaaaagccgtcctttgcataagacgggtcgatatgaaaaccacccgtgacaaaccagagatttccgctgtaatccatcaccgtactgagcaggttcgtgtcgatatcatccccaagcgcggcttttgccgctgagacgacatctacatcgagcgctttctcaaaaatattgcgtacgtttcctttctcatcggccgttcgcatcatcagaacatgcccgtgtgtcgttgggccaacgacaaggccgttgctgtctacaaaggaataggatatctgaatcccgtacttctggttatcgtcacgtaccggcaaaaagctgccgagcgtttttacagggctgctgtttacatcgcggacagcgattcccccgctaatcgtccccttctccgttaccaggctgtagggtgtgatgcagttgccgtttgaatcgtaaaaaaagcaaggtatggccttatccgcctccgtttccgcggaggaaacaatttcaggataaatccccagcggtaccacctgtgccgttacatccgagctgtaggcgtcgttgtggattatcgattcaccctgcgcaaggtagggattgcgtgccacgttgttcacatccatcaggcgcggcacaagcgcaaccgccttttcttcggataccgcctgcttattttcctgctcctgtacggcacagcccacgcaggacagtgccaaaatagccgataaaataattgccaggaatcgtttcattctcttcacacccacttacaaagaatatttaaaacagcttataaaccgcaagcgcctgcttttccatgtcagtcgtacctagcccaagaaaacggccgtccggcgccttcacacggagtatttcattttccaaactgccgtccttcagcgcggtgcggcaaaggtcgagcgcgccgccgttttgaaaacgcacgctctgcgccgctgtaactttaatttcacggtattccataaaaaggctttccgtcggacgaagcagcccttctatccgccctgtgccagccagctccttcatttcatcgagcgaaagcgcgtcgtcaagcgtaaagccgcacgctttggtccggcgaagctccgtcataattccgccgcactgaaggcttctgccaatatcgtcaatcaggctgcgcacataggtccccttggaacaggcgatatgcagccggccgcacgccgtctcttcattataagataacagcgtaagctcgcttatggtaaccgggcgtttctcacgctccacctcaatccccttgcgggcaagctcataaaggcgcttgccgtccttactgacagccgaatacatcggcggaatctgcatgatttcgccgcgaaacggcccgagtgcccggcaaagcgtttccctcgtaacactgacgttttccgtccgggttaaaaccctgcccgtactgtcgagcgtatctgtcgtgacgccaagctgaaacgacgcgtcgtattccttatcgctgtccggcagaattgcctgcgcccgcgcagcgttccccaaaagcaaaggaagcacgcccgtagccattgggtcgagcgtgcctgtatgtcctattttcttttgggaacagagcctgcgcatgacggctacaacatcgaaggaggtaaaatcctgcggcttgtcgattatgagtatcccgttcacactatcatcctgtctgttctttttccgttactgtaaggcggcagccgcggcttcaatcatcgcaatcttctcgcgctcccgctgcgcctgctgcctgacgttttcaatgaccttttccggcgcctttgaaacaaagccttcgttattgagcttgccttctgactgcgcaaggcgttttttcgtgtcttccagctccttgttcaggcgcgcaagctccttttccctgtcaacgagctcgtccatcgggatataaatcttgcagtccgccgtaactatggtcacggcgccttctatatgatagctttcgccaacctctaccccgcttgcgtaggcaagcttacagataaacggcgcgccgctttcaaataccgcctgcttttgtgtggcaataaataccttcgcctttttagacggcggcacattcatttcactgcggcggttgcgaatggcacggatggcttccatgactgtctccatctgcgcgctttcctgcggatattcataatcctgcctgtattcgggatatttttgcagcataatcgtctcgccctcatgcgggatggtctgccagatttcctccgtgatatacggcatgaacggatgcagcaggagcaggattttgtcgagcacccaaaccagcacctgccttgcgttctgcgcggattccccttggctttgcaggcgcgccttggcaagctcgatataccagtcgcagtagcagtcccagatgaaatcgtagagcttctgcacggcgatgccaagctcaaacttttcgagattctccgtgacctccttagaaacaaggttaactgtgtggataatccacttatcctccgtggtgagcacaggcgtcagctcgttctttacattataatcgtcgatgttcatatgaacgaaacgggcggcgttccacagcttatttgcaaaattgcgggacgactcgacgcgctttgtgctgaagcgcatgtcgtttccgggggaattgcccgtcgcgaggaagaaacgcagcgcgtcagcgccgtactggtcgataacctcgagtgggtcgattccgttcccgagcgatttggacatctttacacccttttcgtcacgaatcaggccatggatgaacaccgtgtcaaacggctgctgctgcatctgctcgcagccggaaaatatcatgcgggcaacccagaaaaagatgatatcgtagcccgtaacgagcgtgctcgttgggtagaaatagtcgagctcaggcgttttttccggccagccgagtgtggagaacggccaaagcgcggaggaaaaccaggtgtcgagcgtgtcctcgtcctggtgcaggtgcgtactcccgcatttcgggcaggtatgcggctcgtccttgcagacgataacctcgccgcacgcttcgcagtaccacgcgggaatccggtgtccccaccagagctgccgtgaaatgcaccaatcctttatattctccatccagtggaaataaatcttttcaaagcgctcggggataaattttgtctgcccgcttttgacgcatgcaaccgcaggctcggcaagcggtttcattttaacaaaccactgctttgaaaccttcggctctacaattgttttgcagcggtagcaggaacctacattatgcttgataggctctgttttaacaaggaagccctgttcctccaaatccttgatgatggcttttctcgcctcgtagcggtccatgcccttatattttcccgcgttttcattcatgacggcgttgtcgtcgagcacgctgattatgggcaggctatggcgaaggccaacctcgaagtcgttcgggtcgtgcgcaggcgtaatcttaacaacgcccgtaccaaagtcccgctcaacgtatgtgtccgcgacaatcgggatttcccggcctacaagcggcaggacaagcgtcttcccgaccatatcctgatagcgttcgtcgtcgggatggacggcgaccgccgtgtccccgagcagcgtctccggcctggttgtcgcaagctctacatatccgctcgagtccttgagcggataacgcaggtgccagaagaagccgtcgtgctccgcaaattcgacctccgcgtcggaaatggacgtacagcatttcgggcaccagttgatgatgcgctctccgcggtaaatcaagcccttttcatacaggcgtacaaaaacctctttgaccgcctcgctgcacccctcgtccatagtaaagcgctcgcgttcccaatcgcaggaggagccgagctttttaagctggtcattgatgcgcgagccgtactgttccttccacgcccatgcacgctctaaaaaaccttccctgccgatttcctctttcgttacgccctctttgcgcatctgctcaacgattttcgcctccgtcgcaatggaggcgtggtctgtgcccggcacccaaagggcgctgtagccctgcatccgcctgaaacggattaaaatatcctggagcgtttcatcgagcgcatgccccatatggagctgcccggtgatattagggggcggcatcacaatggtatacggttttttgtccttgtctatttcagcatgaaagtagttgccctccatccaaaagccgtagattctgtcctctacttccctcggctcgtaggcctttgcaagttcctttgccatgatgttctctcctccggtgaaaaccgccgctgcccggtaaaatgccggcggcctataatatatagttgttttttattatcccacccggcaggatttttgtcaatgcgcacgctgtgcaaaacgcgcactttttgccgctggctggccgctttcattcaatcttttgttcccgcggcttgcttcgcgcccagaaaatgatataataggccatattaccatcagaaaagcggatgaggatttatgtacggctttcaggtcaaacgctccaaacggaaaaccatgtcaatagagattacaaaggagctttctgtgcttgtgcgctgtcccctgcgcctttcaaaaagggaaatcgagcgttttctcgcaaaaaacgaagcatggatttcagcccatttggaaaccatgaaaaagcgcgttgagctggaacagaagcacgccttgaacgagcggcaggttgccgctttaaaggaaaaggccaaagcagcgcttccttcccgtgctgctttttacagcaccctgatgggccttacccccgccgggataaaaatcacctcggcggaaaagcggtttggaagctgcagcgcgaaggacagcctctgcttttcttaccggctgatgctttatcctccggacgcggttgactacgttgtcgtgcacgagcttgcgcatatccggcacaaaaaccacggaaaacagttttatgccctgattgcacaggttatgccggattataaagagcgcgagcggctgcttaaaaacagttatgcttatgaagattttaacgaaacggcggtttgatttatgcttcaggttttatgtgttggctgcggcggctttatcggcgccgtgctgcggtatttgatagggcttgtcccgtttcatggggatttcccgcttctgacctttctcgtcaattttaccggcgcgtttttcatcggcgttttctcacagcttgccgcaaggcttcccatggataaaaacatgagcctgttcctgcgcacagggctgtgcggagggttcaccacattttctaccttttccctggaaacgctcacgcttttacaggagaagaaatatctggccggcggtgtgtacgccctgctgagcctggctgcctgcgtacttggggtatggctcggccagctgctcgtacgcaccctgtttaaggccgtataattataattgtaaaggagaacgccatgtttccgtttatctgtcccgtttgctctaggccgctgtatttaaatgggcaaacactgcggtgtgaacaccgtcattgctacgacctttcaaggcgcggcgtggtcaatctgctgatgtcccagaaatcagcggataagcgccacggcgatgataagctgatggcgcgctcgcggcgggattttttagaccagggcttttacaagcctttgcttaaaaaaattaaagaaattgttttgccgtactgcccgcgggaaaccgtcctgcttgacgtagggtgcggggagtgctggtataccgcaaatcttatttcatttttaatggaaaacgggaaggatgttaccgccggcggcgtagatatctccaaagacgcgctcgctataggcgcgaaacgcagggaaaatctgtccctcgccgtcgcaagcgtgtcgaggctgcccgcggccgacagctcctgcgacatcgtactgaatctcttcgctccgtttcatccacaggaattttcgcgtatccttaaaagcagcggcgtgctcgtgcgcgccgttgtgctggaagaccatttgtgggagctaaaagccgccgtttacgataagccctaccggaacccgcctgaaaagaaagagcttgcgggctttgcgctgctgcaatatgaagaggtaaaggatgaaatccatctggtttccagcgaacaggtccagtcgctcttccatatgacgccatactattataaaacagggatagatgatcagcaaaagctagatagtttgcgggagcttaccgttcggacgcagtttggagttcttgtttataaaaaggaagggcagctataaacctgcccttccttttttattttatctgcggcgcacctgctttttttaagcggtacgactctttttttattgaaccttccactgcgcttattggacgataaagaggcgggcggagcgttttaaaggaaaatataaatatacaaactacaaccagccttctagagcagattcccctctttacacgccttaacaggcaggccgggcctgtccggaggaagcaccggcttcctgcccggcaggaaacgcttgaaatagtaccttccccgctgcacggcggagaaagccttctggcacatgttccacagccgcatttccttttggctgtaaacatacgtaaactcgcctgcgtaaacggcgacccttccctgaaagccctgcttaaaccggtaaacgccgtaatttctgtgcgcctgatcgtcataatgcgggattcccataaaatcgtacaggctgcatccgctttcgcaggcccattcaatcatccgccactgcatcaggtaattcggcatcaggctgcgcccttcgtttgacgaagcgccatatacatagcatgtgcgcccgccgtaccgcacgcatatggcgccggaaagggccgtgccgtccttatagcacaggtaaagccggcagtcgccgccaaggctgtccatcattcgttcaaaatactcttgggagcgcacggcaaacccgtcgcgctttcctgtctcgagcatgagcctgtaaaaatcattgagccgttcctttgagtacggcctgcatataacgcccctgcgctgcgccaggcggatattgtaccgccatttcggcttaaaccgcgcaaacagctcctccggcgttttccccttgatatcgagcacatagttttctctcgtttgcgccgtacagccatccggcatatgcggagtaaattcaaagccgcgttttcgcataaagcttaaaaacgcctcgtcgtcctccataacaaacgggtcggccctaaacgcgcaggcgcggtatttctgcgacaggaaaaacgcgccgtcaaacaggcaggaaagcagcgcctcgtcatgcaaatcgcataccggccccctgggggaataaagaaggctcgtcccaataacggggagcgtctttatcaaaattaacatagacgcgcagattgctcccgaagaattccgtacggcaactccctcacatttccacgcacgttttacgccccgccatttgagcgactgcatgaaggagccgttttcatgccccgcaacaaagcgctcgtattcctcacaaatttccggcttattaaaatttaaaatttcataatgaatctgattgtgtttttccactgtgccatctccgttttctttattacggacatagcatacccataaggagtttcatggggttatcaggattgtatcattttcgcatatttttattaaaaaacggggcttaaaacccaatcgtacccagtggaataaaatgcaagtgaaaatttttgccccgctggggtacaggtaaacccacttacaccggaaagctcggaataaaaatctgtcgtctctgttgtatcgtaatagagatatgccgcataatttacaagtatttcgggttgaatctccggctgcaccatctgcccgtagggttcactatctccatccgacaaatcggcagacgcataatccccggggcttaggtaaacatcaacggttaaaatccgtccaattatggcgtcgagtgtaagctggtacgccattccgttcgtgctgacggttgccccccatacaggaaacgctcttgccccgctgtcatactgcacaatatttatcagggtggccgcaagctgttttttatcctcgcctattttcaggttcgcaaagaatcccagggaatcggtggggtcgagcttcgccatttccctcttgatgacttcgaataaatctttttcttcaatttcctgtcccgatttcaggaaaaaatcggaggaacgcgcagcgttctgcatcccataatttatatcccgcgccagcataaaaagcttgtcgtcctgggggacgtcctccgaaagggccgccgcctgttcagtatcggtctttttctcctcactttggtcaatcagcgaaaatgccgcctgcggcaggaacagcgacgaaaagatgacagcgcaggtaagcaggatacataaaaccatcggaagctttttcattccccgccgcctccttccaaaaggaacgagactgccgttcccttgccttcctcgctttttatttgaatctgcgtacggtgtacgcccgcgattcgtttgacaatagaaagcccgagccccgcgccgttttgccggcgggaacgggacttgtccaccatataaaacggctctgtaatgcggcctagctgctcctgcggtataccgcgcccttcgtcgctcaccgttacaaggacgccctgctcattttcctttacgctgagcaggatattgccgcccggatgggaggccttacaggcgttgtcaactaaattataaagcatggttttcatcagcgtcggctcaatgtaaagcctagtgtcgtcaatgtcggtatacagcgtcgttttgtattttgcaagcgtcgggcgcagcgtattggccgtttccttaataaacggacgcgcctgcgtccatgtacgcgcaaaatcttcttttgcgtaaaccatcaaatcgagcagcttaaacgacagcgcttccaggcgttttccctcgctgaaaatatactccgcggcggtacgcctgtccgcggcgtcaagctcataggagcgcagcatgtccgcatagccgataatcgaggtcagcggcgttttcagctcgtgggcaaagcttgcggaaaaatcctcctgccgcctcgccgcgttttcaagctcctctatattctgctcaatagcgtccgccatcctgttgaagtctccggtaagcattccgatttcgtcgctgctctttttgcggatgcgcatggtgtagtcgccgtccgccattttttttgcggcaaacgaaagccttttcatcggagaagtgagcagccgcgatgaaataaaaacaaacacggagcttaacagcacgacgcccaggagaatgacgcggtaaaggtttaaaaactggctccgctgttcataaagcggcgtgatgtcgtgcaggttttccaggtaaatcatgtcttgtcccgtcagcggcaggcggctgatgacctgcacataataaatatcgccctgccgtacaatgcggctgccgcgcgtacccggctccagcgaggacgcaaactcccgcgcgttaaagtgcagcttggcagtccgcccaatgtacgcctggctggtaccgctgcggttcaaatagctttgaagctgggcgaccgccgcgtccagtccctggctgtcatacacctgcatggtattaaagtcggaataaagggatgcgtaaagaaaacggttttcctgcatggaggcttccttttcgcgggaaaggccggattcgaacagggaagaaatcaggaaaaagccgccgcagccaaacgccagcgtaataataatcacgcttgaaaaaaacagcttccacgaaaacttcatttcaacatccctccccgtccctttcagcctgtaaagcggtaccccaccttataaaccgattcgattttcttttccaaatggagcttcttgcgcagccgctggacatgcaggtcgaccgtcctggtgtcgcccatatagtcgctgccccatacgcgttcgtaaataatttcccggtaaagcgctatgttcctgtttttcaggaacaaaagcagcagttcatattccttcatggtcagctcgacagccttcccgcggcaggtaacaatccgggaatttgtgtctaccgttacgtcgtccaaataatatatcccgtcgccgtcgctctttttacagcggcgcagcaccgtttccacacgcgccagaagctccgccgtttcaaagggctttgtaatataatcctccgcgccgagcctgagcccggctaccttgtcatttaaggataccttcgccgtaataaaaatgaccgggatatcgtatggcctgatatactcgagcagggaaaagccatcgataccgggcagcataacgtcgagcagaatcaaatcgaacgcgccggggcgaatcatgtcggcggcctcgtttccgtcatagacacacgtgcactggtaccccgcaagccgcaggttcatagacaaaaggtttgcaatcggcacctcatcctccacaatcagaattttccgcatgttctcccgtccttttcttttgatatccgttttatcataaacagccggtgtatcggaattgtatcttgcccggattttctttccttcttattatacggcagaatccacagaatcaaaagcgaaatgttattttttcagcaggcctttgagccacaggatttcctccttcttgacagcgcccgtcagcgtcatcaatagaatgtatacgagtacgacgagcgcaatcaatacgaccgtccacgcgccggtaatcggcacaatgccaaagtcgtccaaaaaaccaagcaaggcacacggcagcgcgcttgcaagaaacggcttgaaaatccattcgaccggatgaaatttgacctgcgtaaccttgatgagccttgcaaggctcagggaagtatttaaaaccgcactgataaacatgacgataaccaggcccttgattcccataacgggaagtaaaaagaatatcaggacgacgcgcagcgccgagtcgataatattgtatgtcaggtactgcatctgctggttgaggcccttgagcataccgtcgactacgctgtcgaggtaattgagcgggacgattggcgcaagcacacataagtatacgccgacctccgcgctgccgtaaagcagcttcccgaggctgtccgcaaagaaaaaaaagattaccgccgtaggaacggcaaacagcaaggcaaaccgcaggatgcgctgcgtcatgtagtggatggcgtttttatgcgtcgctgcgtttgcttccgacatttcgggtatcatcagggaggaaaaagacatcaaaaaagcggacgggaattgcagtaccggcatgaccatcccggtaatcatgccatagtccgagagcgaccgttcgtagctcgccccatactttttgaaccccgcgggaatgagcatgttttccgcggtggaaagcccggagcgcaggcaggagcttgccgtgacaggcgcgccgatggacagcactttacgcaaaaatttcggcatgggcgtttcctttcccttgagcttccttgcatccattgcgtagagcacataggaatatacgcaggtgacgacctccgacagtgccgttccgacagcgaccgagcagcaggcgtaggcaagccccataggagccatcgtaccgacgacgcaggcaaaaacggcaatttcaataatctgctccaaaagctgctcgcttgccgtcttgattgccgtccgccgggcgaagaaataaccgcggaagcatgcggacaccgccataaagggcaggctcggcgcaagcacacgcagggacaaaaccgtgcgggaatcatttagaaacccctccccaatcggctgtgcaaaaataaacagggcggctgcgcacgcaaggctcagtgcaagcccaatcaaaaaacagcggcgcgtcacgtactttgccctgcccgtttccccctttgcaaggcagtctgtgacaagccgcgttacaatgagcgtaatgccgcttgttgcaaacgttgtggcaaaaaaataaacggcgcagatgagctggtaaagcccgatgccctcggcgccgattatatttgacatatagacgcggaaggaaattccgatggtccttgtaacgagcgacgttcccgtcaggaccgccgcattgaataaaaaccgttttttcttcaaattttgcaccttctttgctgtttcctgttattcatgcttatgcgtaaaacgtcttgaaaatcctgcatgtacaagaaaaaattggattaacataatttattttccaatcgagcataatatttctgtgtgtttcgattaaaatttgtatggatatatttataattaaaggaagagggcagcggttatgaacgattatctgatttttaccgattccaatgcggatttgacgccggaaatgatagcagagctcgatatcagggtcattcccatgcaatttaccatctcggataaggattatctcgattatcccgaccacaaggagctggctattacggatttctacgctaagatgcgtgaaggaaatatgtgtacgaccatccagctcaacccgaacgatttccgcgagcagtttacgccctctttggaagaggggcgcgacctgatttatattgccttttcctccggcctttccggtacgtatgcctcggcgtgcatggcggctgaagagctgaaaagcgaatatccagggcgcaaaatcgtcatagtcgattcgcttgcggcctccatgggcgaaggcctgcttatctggcacgccgcgatgaaaaaacgcgaggggctttctatcgaggagctcgagcagtgggtggttgaaaacaggaaccatttatgccactggtttactgtcgacgatttgttccacttaaagcgcggcggcagggtttcggcagcggctgcggttattggttcggcccttggcatcaagccggtgctccatgtggacgacgaaggccacctgattcccgtcaagaaggtgcgcggacgcaggcagtcgctcgacgcgcttgtcgaaatgatggcgcagaccgcaatcgacccgcagcagcagacggtgttcatcagtcacggcgactcgctcgaggatgcgaaatatgtagaaaaaaaggtgcgcgaaacctttaaaaccaagcagacgcacatcaattttatcgggccagttatcggcgcgcattccgggcctggcacaatcgcgctgttctatctgggaacgcataaataaaaaggccggctaccggcagactataacaagggacggcttgcgccgtcctattgttgcttttacaaaagctttttcgatttttatcataaggcgggtggattccctttgcgcaagctttgccgttatttaaaggattataaggttcatctcgtagtcgggccgttatgcaagctgctcgaggcggttttcgagctgattgtgccgctggttatggcaagtattatcgatatagggattacaaaccgtgacaccggctacatcctgcgcatgggcggcgtaatgattctgctcggcgcggtcggccttgcgagcgcacttgtctgccagaaggtcgcgtctatcgtatctcagggcttcggcacaaagctaagaagcgcgctgttccgccacatcaatacactctcgttcgaggagctcgacaaaatcggcacgccttcgctcattacacgcatgacaaacgacatcaatcaattgcaggtcgcggtcgctatgcttatccggctcgtcatccgttcgccgtttcttgtgattggcgccatggtcatgtcgtttacggtcaacgccaggctcgcgctgatttttgtcgcggcagcgccaattatcgcttttttcctctattttatcatgagccgcagcgttccgttttttaaacaaatccagaaaaagcttgaccgtatttccatgatttccagagaaaacctctcgggcaaccgcgtcatacgggcgtttggcaagcaggagcaggacgaagcgcgtttcaatgaggcggcagacggcctttccaaaacatcggtacgcgtcggcaggctttccgcactgctcaaccccgcgacatacgtcgtcacgaacctcgcaatcgcggctgtcgtatggtttggcgcggggcttgtaaataccggggaaatgatgcccggtgaaataattgcgcttgtaaactacatgacacagattctgctttccatgattatcgtcgcgaacctcgttgtaattttcaccaaagcgtcggcatctgccgcgcgtataaacgaagtgctcgaaaccgccccttccgtaaagcagccgtctggtaaaacgcccatacaaaaacccaatgcccctaaaatcgaattcgaaaacgtcagctttgggtacggcggggaggccgtgctttgcgatatcaaccttcaaatcgaaacgggagaaacgcttggcattattggcataacgggaagcggcaaatcttcgcttgtcgggctgattccccgtttttacgacgcggaaaaaggccgtgtcctcattgacggcgaggatgtccgcaattatccgtttcatatcctgcgcggcaaaatcgggtttgttttgcagaacaccctgctctttaccggtacggtgaacgacaacatacgctggggcaggaaggacgccacacaggatgaaatcgaccgggcgcttaaaattgcgcaggcgtacgattttgtacaacagcttcccttaaagggtggtacacatattacgcaaggcgggaaaaacctgtccggcgggcagaagcagcgccttacaattgcaagggcgcttgtcaaaagccctgaaatcctgattctcgacgacagcgcaagcgcgctggattttgcgaccgacgccgctttgcgccgtgcgataaaagccgaaacagagaatatgaccgtgcttattgtttctcagcgcgttgcgaccgtgcggggcgccgaccggattgccgtgctcgacgagggaatgcttcagggccttggaacgcacgaagagctcgtcaaaagctgcccgccctaccgggaaatctgcctttcccagcttagcccggaggaggtgttcggcagatgaaaacgctaaagacagtcaggcgtgtcctttcttttgcaaagccctaccgcgcctatctgctcggggcgctgctgtgcgctgtcgctaccgtctgcctgacgctcctggggccggtgcttgtcggcagcgcaatcgattttattatcgcgcagggccaggtcgattttgaaagtgtcggaaaaatcctgctggggctgctgctggccatagccggaacagccctgttccaatggctgatgacgctttgcaccaatgcggtaagctactacacggtgcgtgacctgaggcaaacgctttttcaaaagctcaacgcggtaccgcttaaatatattgacgcgcacccgcatggcgacttaatcagccgcgtggtcaacgacatagacgcggtgggcgacgggctgctccagggtatcacccagcttttttcaggcttgattacaatcatcggcacgcttgcctttatgctcgccatcaactacaaaatcgccgttgttgtcgtgctcgtcacgccgctgtcgctttttgttgcggcatttattgcccggctgtccgcgaaaatgtttaaggagcagcagcagacgcagggcgaaatcggcagctttattgaagagaacatcggcggccaaaaggtcgtcaaggcgttttcccgggaagaggccaaccaggaaatcttcgacgaaataaataacaggctttatatctgcgggaaaaaggcacagtttgcctcttcccttgcaaaccccagcacacgctttgtaaacgcaatcgtatacgcggcggtcggcgtaatcggcgcagtcagcgccgtgctgggcgggcttaccgtcgggcagatatctgtctttctgacctacgcaaaccaatacacgaagccgtttaacgaggtcaccggcgttattacacagctccagacggcaatggctggggcacggcgcgtattcgaggtactcggcgaacccgcagaacgggaggacagcccggacgcccaatcacttttgagctgtgacggcgcggttgaaatagcgcatgtcgatttttcctacacgccgcagcgcaggctgatacaggacttcaacctaaaggtaaagccgggacagcgtgtggcaattgtcggcccgaccggctgcggaaaaacgacgctcatcaacctgctgatgcgcttttacgacgtagacagcggcagtatccgcatcgacggccatgattcacaaagcattaccaggcggagcctgcgcgcgatgtatggtatggttttacaggaaagctggctctacagcgttagcatccgtgacaatatcgcgtacggcagggagggcgcgacggacgaggaaattataagcgctgcgaaagccgcctatgcccatggctttatttcacgcctgccaaacggatacgacaccattgtgacagaagacggttcaaacctttcgcaggggcagcgccagctattatgcatcgcgcgcgtaatgctttgcgatccccctatgcttatactcgacgaagccacgagcagcatcgacacgctcaccgagcagcgcgtacagaaggcgttccagaaaatgatgaaggggcgaacgagctttgtcgtcgcacacaggctttccactataaaagaggcggatattattcttgtaatgaacgacggcaacatcattgagcagggtacacacgaacagctgctcaaacgaaacggtttctacgccaagctttataacagccagtttgcggcttcatagataaaatgcatcactatgtaataaattattttaaaaaagtttttgataggccggaattcggagcaaaacgctctttttagaattccggcttatttttacgcaaattttcatgcggaattcctacgcgcatacctgcagggacaacatgaaacgccccggaatataatgaatatgaagatacatattgccgtgtatcttcgataaatttacagttaggagtgtatgtattgacctacaacacttacggaaaaggaaatacttgtccgatttgcggaaacccttggtgtaattgctgctgttcctgcagcccatatccggcctgtgcgactggcgcgacaggtgcgacagggcctaccggagcgaccggccctgtgggaatgaggggcgcgacgggtgcgacaggccctgcgggaatgaggggcgcgaccggagcaacaggtcccgcaggcggcccaacaggcgccacaggcccaacaggcgctacgggtacgacaggcgcgacaggtgcaactggcacaattgctcctgataccgccctttttacagtcaacggaacagccggagtaaccgctaccatgcggcttggggatgttcttaccttccagtcaactgacggctcaatttcagcgactgtttcacaaggctctgcaattgttgatttaagttcaaatgatactgttgggcccacaggtccgacaggcgctactggcgcaacgggtcctacgggtgctaccggcgcaaatggtatggctggcccgactggctccgcaggtgcaacaggaaacacaggagcgacgggtgcgacaggtccgacaggcgctgcgggtattaccggagcaaacggagcgaccggcccgactggcgcaacaggcgcggacggtgctaccggcccaactggcgctacaggtgctacgggcgcggacggtgctgccggcccgacgggtgtgacgggtgccacgggcgcaacgggcgctgatggtgtaaccggccccacaggcgctacaggtgctacaggcgctgacggagcaaccggtccgacaggcgctacgggtgctacgggcgcggacggtgctgccggcccgacgggtgtgactggcgctacgggcgttacgggcgcggacggtgccgctggcccgacaggtccgacaggcgctacgggcgctgacggagctaccggcccgactggcgctacgggtgctacgggtgctacgggcgcggacggtgctgccggcccgacgggtgtgacgggtgccacgggcgcaacgggcgctgatggtgtaaccggacccacaggcactacaggcgcaacaggcgctgacggaacaaccggtccgacaggcgctacgggtgctacgggcgcggacggtgctgccggtccgactggcccgactggctccgcaggcgcaacaggaaacacaggagcgacaggtgctacaggtccagctggtcccacgggcgcaaccggtgccacaggcgcagcaggtacagccggcgctacaggcgcaaccggtgccacaggcgcagcaggtacagctggcgctacgggcgcaaccggtgccacaggcgcggcaggtacagccggcgctacgggcgctacaggtgctacgggagccacaggcgctacaggtacctctacaaccgtcaacagtatgaatgccactaacaccaccggcgctaccattgcggtcattgtgggcggcacacctgttccgctgcctgactcacaggtcttggacggctttacagtaaatggcgcaaacgatacctttaccgttcccgtcacagggacctatatggtaacgtaccgggtttcgaccacagcggcgctgttgatgtcctcgcgcgttctgcgcaacggcaccacgcttcccgcctccaccttctccccggttgcttcggttagctcttattcagctacaacctttgcggccttaaacgcgggcgatacgctccagctccagctcttcgggctgctgggcgctgcggttcttcagggcggcaacggcgctactctgacggtaatcaggctcgcataaattaaaattgaaaaaacacttccagacgggggctgccagttttccggcggcctccggcgcaggcggtaatattacattattcccttttgaaaggagagcccaatgataaccctgagtctttgcatgattgtaaaaaacgagtcagacgtccttggaaggtgtctttcctgcacgaaggacattgcggacgagattataattgtggataccggctctaccgacaatacgaaagaaattgcgcatggctttaccgataaggtttacgactttgagtggtgcgacgactttgcgacggcacgaaatttttctttttcaaaagcatctatggattataccatgtggctggatgccgacgacgtaatagacgaaaaaaaccgcgcgctgctcctaaagctcaagaatgagctttctccctccacagatatggtttttttgaagtatgacgtagcctttgacccgcaaggacgccccacgctttcctactaccgggagcggatattccggacagcgctccattaccgctttataggggaaatacacgaggtaatcccgcagagcggcgtggtagagtacaaggaaattacggttcagcaccgaaagctccatcccaccgagtcagggcgcaacctgcgtattttccaaaaaatgctgtctgacggaaaaaagctcgacccgcggcaaaagttttattatgcgcgcgagctgatgtataccggggactataccgccgctgtccggcagttcaatgaatttttggacgaagggcagggctggatagaaaacaatatcaacgcctgtaaggatttggcgcagtgttatgcgcgcctgggagaagatatatctgccctgcagagccttttgcgcagcttttgctatgatgtgccgagggcggagctttgctgtgatatcgggaaatatttttttgaccgggagcaataccagacagccgttttctggtacgaaacggcggcaagccgcacgccggatgagcataacggcggcttctgcctgccggactgctacggatacattccatacatgcagctatgtgtctgctacgacaggatgggcgaccgcgaaagagccgcacaatacaatgaaaaggcggggcttatcaagccggacgacaaaaattacctttacaaccgtgcttactttcaggataataccggcggttcagaataggtcttccatccaagctccccatttatcgcatcatgcaaagagcggcggccgttatataacggccgccgctcttaataatcgtcaagcaaatcaggaatccataacaggtaaaactgcctactaccgggctaagtcatactgccggtagcgggctaccttggcggctgaggcggaactctcgtcaaagcggcaggaaagccaaaccttcaccagctcttccgcaagcttttcaccgattgtaaacgcacccaggcaggcgatgttgctgttgttgctttttaccgcgcgttctgcggaataaacatctgtcagaagcgcggcatatgcgcccctgaccttattcgcggcaatttccatgcccaggccggtgccgcacacaagaattccccggtcgtattcccgcgcggcgacggattccgcgacaagaatagcggtgttcgcgtaaaccgggtcttcgcttccaaaatctgccgtctcgtgtcctaattgtacacataattccatgaggcttgtttttagccgcacggcattggggtcgcagccaaatgcgattttcattgcggcacctcctccaaaagcagtgttatgctgtccgcaagggcacgcacaatcaaataacaggagcacgcccccgcgtccaggacgccccttgagcgttctcccagccggctcgccctgccatatttcgccgtcatgtccttggtagactccattcccgcttttgccgcctgctccatgttttgcagcgcgatggaaaaaggcgtgctttcagccgcgtccttctctaaagaagcggcggcgggggccagtgtatccaccagcgtcttatcgcccaccctggcatcaataattccatacaacccctccaaagcggcggcaaagcttctggaaaagcagcgtaaatcgacgatgcccgtttggtttgcttcgatatcctccgccatttccataaagattgtcccataaatcggacccatcgatcccccgatttcattcattaaaatcgcgctcaaattttcaagcccctcggacaaagtatacgccccgccgccgaatctttcttcaaacaaggaaaagcctttgttcatgtttaccccgtggtccccgtcgccaatcaggccgtcaacctgtccaaggaaagctttgttttcctttattgcccttaccattgcaaggagaaccggggttcctgtttcgtttttgaagaattccataagcacctcctattcctgatggaagcccatgctgtgtgccggttcgtccagtaattttttcagctcatcgtccagcttcattacagtaagcgtagctcccatcatttcaagggaagtaaaataattccctacatatgccttatagattttaattttcctgctttccataattttttcgatttcattgtacaaaacataaagctccataacaggcgtcgcgcccagtccggaaaccaggatggccgtctcatctccgctttcaagcggaaaatccggcagaatgatgtctgtcatttttttggcgataccctttgcgtcctccatgccgcagacggacgtgccgggctcgccgtggtggccgattccgacctccattgtacccgatgaaatctcaaaattaggatggccgacagcagggagggtacaaggcgttaggcctacacccacgctgcgtgtcgcgtcaatcgccttttgcgccgcccggataacctcatcaaggcttgcgccggcagccgccatcgcgccgccgcatttccacatcagcacctctcccgcgactccgcggcgtttatccgcctgctcctttggggccgaggcaacatcgtcgtttgctacgacggtctttacagtgattcccattttctgcgccatacggacagccatctttacattcatattgtctcccgagtaatttccataaaggcacgcgaccccgtttccgctgtcggcggcaatgaacgcgtccagaaacgccttcgcggttggtgaagaaaaaatctcgccaacggccacggcgtcacagagattttttccgcaataccctataaacgccggcttatggccggaaccgcctccggttacaatacccacccgcccctttgtggaatatacagactttaccacgcgggggtttgccgttttctctactaagcctttgtgtgcttttacaaagccatccaccatctcatccacgataaaatcgggattattcataatcctttgcattgcttaaccctccgtccctggaatcaatatgaccttcattgcgccatcttccccggttcgcgcaaggcggaacgcttcctgccaattctccagggtatatttatgtgtaaccacaccatcagccggcagcttgccgctgccaatccattcgattacggtatcatagcagaacgggctgaggtgcgagcccaaaaggtcaagctccttacggtcggaaataatagaccaatccacagtgaccaggctcccgaacacgctgaactccacaaagcgtcccattttgcggatgcatgcaagcccctgctgcacgctggaaggatgtccggtcgcttcaatatagatatcgcagccatagccgttcgtcagctccttgattcgttctgacgcgtcttcctttccgggattcataacaatatcggccccgaattccctggcctttgcaagacgcgcatcgttcatgtccaggactatcaaaagctttggattgcattgcctcagcgcgccaaccatcccaagccccaatgtcccggcgcctgccagtacaacaacatccgtcgtttttacctgcgccctctccacgcagtggaaggaacagccgtatggctcgatgaggaccgcctgctcgatgggcatttttttcgggacaaggtatggcagcgcttccttagtcagcttgacatattcagccatgccgccgttgacgttgttttgaaagccgaataagtcatgcttttcacacatccaatgacgcccggttctgcaaaacatgcattcgccgcaggggacgatttgttctgggcaaatcctgtccccaattttccaattgccttttacatttcgtcccatttctacgaccgttccaacaaattcatgcccgggaatcatcggggctttaatatagggagggttgccgtctcctccccagaagctgggcgctccagcaaacgccttgacgtccccggcgcaaattccgcaggcttccaccttcaaaatcatttcctcttcccccgcgcggggcgtatcgacaagctccagcctgtagtcgcccggcgcatatgccacgattgccttcattttttcaggtaaggtccccatacgccattctccttttcttttgcattttgtgtgttcggattattatagaaactacttttataaaagtagtttctataataagaatggcatgggccgaggcaaaagtcaacgacttttttccttgtttctttctttttgtgaaaggtatttataccggatgcaaaatccttgtacaatgcgccgataaaaggggctcttccaattagccctgcagcataaatttttctttctaatataagaaaagaatgctataattattgccgacagattgatatagaaaccatggagatatgcttatgaatgcgaccggtgccacaacaaaaaacattcggaagtcaaaccggaagaaaatttttaacctgatttatgagaaaaacgcaatctccaaacaggatattgccgcacagctcaaaatcagcatgcctacggtcacacagaatattgctgagctggaaaaactggagctaatcgaaaaaaacggtttcttcaactcaaccggcggcagaaaggcaaaaattatttctattaaggctcaggcacggattgccctgggagtggaaatccgcgcagagggctgtacagtggccgctgttgatttatacggcacggttattgcgcaacagctttttgaagttccctttcaaaatcgcgatgaatattttattttcctgtgtaaagaaattgaccgttttatcgggactcagaaaattccaagcagcaaaatcctgggattgggtattattatgcaggcgttgatttctgacgacgggcagcgtgtaacgtatggtaagattttagactgtacggggcttgacatctcattttttcaggattatttcgatttcccgtgccgcctgttccacgacgcggaatcggccgcccgaaatgaattatgggaacgacccgatataaccgacgcggtttttttgaatatccgggaaaatttgagcggcgccgtcattatcggcggcaaattccataaggcaaacgagctcaaaagcggcgtatttgagcatatggtacttgtacccggcggaaagccctgctactgcggcaagcacggatgtatgaacgcatactgctcagcacaggggtttttgtatgagaacgaaaccgtacaaagctttgaggataaactcaaaagggcagattttgacgcgcggcgccggtgggacggttttctgcagcatctttccgatgccatcgataacctgcatatggtaataggcagcgacgttatcctcggcggttatgtcagtgagctgatttctgattcggccctcgacaagctgcatgatatggttttgagccgtaccgcctttccattcggacgcagctttattcatcgtgccgtcagcataaatgttccggttgcgcggggcggggcgctttttatggtctcctcatttttaaacgacctgcccaatccggaggtttaaatttagataaagtccctgaaataaaaaaagcggttaaagcaaggagcattctggaaaaaatgcgcccaagccttagccgttttttatttgattttataatattatttatggctgccgttgataacaatcggtttcatcgttcaaacgcgctttctatatttaaaaaataaataaacagaatcgactacatcggtaaagaagaacaactgcatgacaatatgtaatgcgcattgcccctttgtaagagtaccacctttacacattttatatatttgtacaatcagataagacgaagtagcaaataaaaccagataggcgtaaaacaaaaacaggaatgggataacaagccataaaaccattaagaacggatttgccgtaccgctcatcataacaataaaccaataagaatggctaataaaaaatgggattaacgcaagcttaaatcccattaccgtacccaaaggatttttttgagtgctgttgcttgggcgtttcagccccaaaaatgcggtcacaatattcataataattaatacaatcgaaagcaccaataaagcaatgagaaagtagttgcttacaggtaaggggggattctccgtattcataaagagtaaaaatggagatagaatatataacagcaatacttgaatggcatatagtgttaccaatagcataataggcaatttctttttcatcccttaacctccaaaatatacatactcctttttaaaggaagaattctaaattgattgtatcacacaaatcaaaagaagtcgacagcttacagcagcaaccggcttcttactgcatgaatccgggtgttcttacaggatttactttataataatcaaaaagggagcgtcctataaggacactcccgctgtaagggtgagataaaaaatctatcaatcaagccttttatcttgtgtgtctatcgacaacacctaggtgaaaaaaggcgcgaaatgcggatagcaaaaatttgcggcggaatgctttgggtcattactccgttatacaaaataccgataatatctcccgggaaaaagccgcgggtgttcctggtgttgacaattacattctgagaggtagcacggtccctgacaagcagactattaaaccggacctctcgaaccgttgcaatcataagcatggttaatcacctcctgtaccagtatatgttacaggaatagtaaacgcctatggcaagccacttaatgtaacaggtcttgggggcacaaacaaaacccgcctttcaataaaattgtttgaaaaacgggtctatttcgattcagttggcttttttatattgaaaaagtttcattccaagtactccgcaagccgatacgagcagcaatgcaatgcatatagacaagcggccgttatcgccggtagcgggagtgtcttcctccccaatacttgagctgcttttatccgtagtgtctaaaatattatccggctcggcaggcttgccggcagtccctggctctgtcgtattatccggctcagcaggctttccggcagtttccggctctgtcgaatcaggcccgttacgtgctatgtgtacctttaaagaaggttcgagcttttcagtaacgacagaaacaccgtcttttgtgagcaccttgacttcctcaatccggatatctcctctttcaaattcttttgggcacgaaaaccgcaaagtaattttcattagcccggaaagcttattgtcagattcaaaaaagctggtccaatacaaaccgtttgccagtaccgggccggcagacatactgccggatgaaccggaagaagctgtcacagccacactatccggacaggcaagcccgatttccactccggcgtacgcattttccggctcaatttcgactaccgcttcaaaagtggtttgtgtttccgatagcgtaatacgttcttttgcaatacggaccgccgattcctttgcaaaagccgtcagcgagataaacgaggccatacagcaacaggcaagcaaacaggcaatttttttcaaacaaaacatcctctctcacaataaattgataggaaaattgggaatcgccatattttggcaatccccaattcccgtaactgtaacgctcgcattttaggcgataaaaccagtcaagatgataaagtctgccgtatccactgtaccgctgcggtcaatatcgcaggaagcgtccgtgctttgatatttgctaagagcgatggaaaggtcagccaaggttaccaagccatccccattgatatcagaagccgcacgataggatataatttctacggtatcttctccaaccgcgatagcaaccggcccttcaaaggtgccttccccgttggtagctgatgtattgatgctcttaatcgccagtttcgtgctgccgggagccgccttctctttgagctttagtacaacctgcagaacatccgcgtcaccggaaacagcggcgcttgtcccaataatcattcgtgccgtgccttccgcgctcttatctgccgcgattaccgtattgtccaaaagggatttgacttctgccatttcaaatatatcactgtcataagatacggctacatcgaagctgttcaggccagtgagccctttcatagacaccgtacaggttacggtgtcgccgttttccacaaccgccagttccttatcggcatcgattcgcgcactgccagcatttacggcagccacgccgaacggctgggtgaagctgataccttcgtcgcctttcagctgggcacgaacatagctgtgtattttgccttcataatcgttgaggtcaatcgtgttgccggtcgcaatcactttgccgtcagcgacccattcaatcgtattatacaaatcgccttcgatggtaatggtatcctctgtctggtccaccatgatattggtgataaccggcggctgataatcgttgatggcttccaaattagtctcagtatagccttcccttttggcaaccttagcgctggcataaaaggcgccgttttccatcgccgcccgcacattggtagcagtattggaagggaggagcatcatattgtagctgtgaccggtagcagaattggaatgcgtgtcgtcgttggaaaagccccagacaaaccgtccctccggcatagtttctttcaggatattatcccacaggatacggtcggaataggaatccccgtccagcttattgataatttccatgcccacgcaagcgctgtacctggtaaacaggtccacatatttctggacggtcgccggtttgctggaagcttcctcgccggcggtgccgctggtgttgctgccgccggtataccggccggggtgattgatatggcagataccgcctaattcctgcgttttggcaatattgctttccagagtcgcacccgcttgattgttaaacggggtaaagaaagtgttcagatggtcgctcacagactgctcatctgaattcataatagcaaccattccgcggccgcccctgtcggttccatttgtgatggtttccagccgctcgtcggtcagataggtacggcccttgccagtcgggtcatctttacgattccatgtagtattggtgacattgtgatcggtcagcgcgagaatatcatatccttttttgtagtgctcctcaactgtgtcagccggctgcggcgatccgtcgctctcgttggaatgcgcatgaaagtcagccttatactgcccgtaggtttcccagtttacgttggcataggggctgtcaatggtgaaatccaggacaccttttccatccaaaccctgtgctgcggcactggtggcaattgtcccagccaatacagccgccgccaaaaaagtcgctatgattttttttaacattgtgttctccctttctctaattggcaccggttttttccatatactttgcaaacatttgcatctcaattatagttccctctatgtaaagcggctatcacgctaaggtaaaatctgctaaaaatttgttctaaacacttttacaaggcctcccgataaagcatagggcaatatattatataaaaatgattaaccgtccgctgtatagatatcaggcttttatctgcattttttcattcatcgcattataaaacaggatttgaaaaaaccaatttatcaaggttttcacatagaaaaagacccgcttttcgataaatttgttcgaaaagcgggccactctcatggacggaatgctgttacagcatcgaaaaaaggagcgccctataaggacactcctactggtcttataggatttttcaaaaatccagtaaccatgctggtttacaggtagtaaagagcagtatttacgttacctcaagaagataagtcttattttcatagtattaaatttttacaatatacctttccgggtcggcctcatcctcataaagctgtatcccgggcgctgacgcccgcaaatcctcttttatatatatctgctttttagcgggacgtatcatggcaagagcatcacttaaaaagccttgccaatcaatgcctctgtccaaacccttgtagttgttgagctttcctattttgtaatggtcgacactatcgtcgcttagcgtctgttcaatcagcctaaggctttcaaatggctcaatcaccggctcgaaactggcaaaggttttaacgccctgattatgtatttctttgagcactttacaccgttcagcaggtgaagccgcgccagattcccattcattacttttggcttcatcaaaaaatgtaagtgttgcaccgacagaaatactttctccgaactccttgaaaatatccatatccttaagcatccgctcgccgccttttgaaagcaccgcaaccggcgcacgatacagattgaataacttcaaggcttctctggtagcctggctgttgtctgtgttctcacagtaaacgtcgcctataaatgaaagaagaatttgtttatcatatttttgattgcgcaaatcagcttcaaggtatttcagcacaccttttcgcggagaagggataccaaaataattccctgcagagcgctggagagcgtgcggcgcatagcaatactgacatctgtgggagcagcctatataaagattacacgcataagggctgtattcccgcgctcttcctttcggctcataaataatcggcatcgtgtatctccttaattttaagatttaccatcaatagtaaaatagccgtagtgctttctgaaatttccagttacttcatagtaatcaacttgtctaacaccgtaattatatagcattccatagaacatgtccagcgcttttgccgcaattaggtgatgacacttcttataaatcttctgaactccaaacatttttaagcatccaagattgagtccgctaaggcagtttgtaattgctgtataaattataactgttccatctcgcaatgttttgttactgaaaattttcattatcacatcaaaaggaatgccatagctgtcacagtctataacattaaactcagacaaatcaagattctctattattcttttgttgtccaccgttaaattttgcccctttcctctttggatttccacaccgaaatatttttctttatcaaaatggctccatagtgtgttgtttcccgcatataaatcgaggactcgaatcttttcaaggttttgggtagctcgtctgcgcagatgagtcttgtttgctaaactggagttgtcggtactaatcgagtgaagagtcaacttccacgccctccattttagaaatctgttttataatccctgcaattttgtcattgttattgatatccagagaaatcaggtaatggactttcgagtaaggccggagctctttcttctgaagctcttccagacttgtaatatatttttcggtttcaacgccaaaatcattgaaatcgaattgacgaagctcctgtagttcttgcaggagaacaggctcatcaaagccagtttcgagattcagcgcattgtgagcgataatatatgctctctgttcatcgatgctaagatggtcgagccggatacaaggcaacacagtaagtcccagtagcttagcggcttcaattctgccgtttccctctaaaacggtgttgtcggcgcccgcaatcgccagcggatcgttaaatccaaactccttgatggaattcgcaatatgtttaatttgagctgcagtatgaattttactgttattgaaatatggcgtcagttttccaatctctatttgttcaatggttagttcattatttatcatatgtattctccaattattaataagaacgagcttctggtgtcagcttgaggtcgcgccacaatttttcaatatacttattacagtcattcaggattctataatgttcgttttcctttaccacaatttttggcgttgtaccatcagcgcagattcccgttacaatgcggatatatctttccggctttttgagccattcattccatgctttgtccctcatgactttgtgctgtacaaattgccgtatcagctcgacatcagctaaagtttttttataacgggttccgtttttcagtacgccaacaaaatataaccatgcttctttttcgacatcacctaaattctgcggtggttcaatcagcttgtaggattcttcaagcggggaaagttttggcgccggttgttttctgtccaatataatcacattctttcataataacttaggttaaacaagtctatagaatagtcatgattgtttaaacctctacactagtacctataaaataaaaaaagttgactatagaaggtcaacaaattagaaaatttacaaactgtttacattttttacattaatgtagaagtattttttaaggctcttataaaaataataggttaaactattcaggagtaaaataacaaaaatttaacgtttttgtcgacatttgtcctgctaatccaaattcagtatgatacgggtatgcagtcagcagggagcggtatttatatacagatactttccaatatcaaaagtatcaattttctgatacatgtttttagtgacaacaaaaaataccctaaatagcattaatcgaacaaaaagcaaagaaaccgactttgatttacacaaaatcggtttcttcgacattggtcgggatgacaggattcgaacctctgtaatgctatttttaactaatcccttattcaagcctttttttgagttttccccattgcaaagccgtttttcatttttattaaatggaaaatacttttgaaaattgcattgaattttgataaaaaatagcactatgcaacatgaaatgcaacacgaaagtgctcgtatccacacaacggaaagccactgcaaggaattttaagttttgactttattatatgcatatgatataattaatataatttagtgaccgcgttgtagtaacctgcgggtctacaaccatattgaccccccgcacctctccatattgaaagatatgcgatgtgtcccagtgggggacattttttatacggagaaaaaacatgaacataaaacctccaataacatttaaagaacaattatctaatgattgaatcacacaggatttccccaaaaaatggtatgaagtgctaattgaacccaggcctaaaatcccaaaaagaaagccccataattaatacggggctcatttttatatcggcctatttaccttataaccattcatttattttattcatgaaaaagtaataaaaaacgggcggggatattctccctgcccgaaattcaaatgaaagctttaatttatttaattaatagcccaatttttgtttgttgcgatggctttctgttctgctgtaagcttatttagatttatattacctaaaacaagcctttttgacgtctggccgttaagatctgcaagtgcgtcgattattcctaccagcgactccgtgctcagttggctgtttgtagtcaaaatcaattcacagttaaagccttgttcaagcacgagcgtttctaaaagagggcagtctaaaaacggagcacttgcaatccaaccaattgtatttggcaggtaagcttcttttaaaatggggcactctgcaaaaatgtaatcgcctaacgactgtacgccatgatccaaatgagcggttgttaggtttggattgtatgcaaatgaatatgatccaatattggtaatgtttccaggtaccaaaactgtttctagaccagtacgagcaaaacaaaattctggaattgatttcagtttcgtagaaaatgtaacggacttcaggctgctgcacttatgaaatgcctgctttccaagtgagtaaaaatccatcggaaaggtaatattaccagtaatggcagcacagccctgaaaagcatttgccccaatggttttaagccccaccggcaagtcgaggctggtaattgttttgcagccattaaaagcattttctcctattgaagtaatgttttttccgaattctacggtattcagacctgtacagttctgaaaagcattatcagcaatggccgtcattgtgtctgaaaattttacgctcttcaaatacggctgtgcttcataaatccctgcgtcaacttttctctgatcttccggaaactccagatgtgatggataacagctgccattttcgagaaaaacaagttccggaattataccaacatcgggagacataccgataaaatcctttacaatggaaagctcatcggaaagctctgtgatttttccattcaggtcggcaacctcatcggtttcaatggacaatgcgcctccaaggtctaaagtgatactgcctctggtttctttttctgtgctcatttttaaaactccttactgttattgtgattgataatcacggccgtgttaatggaaagggttttaagtatcctttcaataaacctttataaaaccaacgaattcaacctcaaacggtcaacttttgaccctacaaacaaaaattcccccggtttttaggccgggggagtttctttgtcttataagcttatctttcatttcggttca

SEQ ID NO: 544 - DNA, 1078712 bp, Scatavimonas FBI02887
  source 1..1078712: mol_type = genomic DNA
gaaacgggagcacgcgatacctgacagcgtaccagcagccggacgctagcgtctttgttttgctcattgtgattcacttcctttcattgaatcgggattatcgtcctcgcccagcagccgggtcacggggattttaaatgcctgcgcaatcctgataagctctatgagccgaaacgctgtggggtcttgtaagcgatggtaaaacgttgctacactgattccacttattgttgtcagttcgtggttatcaaacccgtgtaaggccgcataatacgcaagattcgcctttaaattttttgctgcgtcctgctttgctttttgttgcgtacctaaagctttaacttttggcattcgttttcatctcctttatgatgttttgattgcttgaccttaaagggttggtcgtggtattattttcttgtactcattcagcctgattgccgtcaggctcttttgtcttgtccggcgttgccgcgccgaacaagtcgcgatgattcatgtgaaagaggtcttccagtttgacaagaacgggataagaagggtttctttctccggtttctattaaccgtatagcctctgaggttagcccggttttttcagctacgtactcgcacgaccatccccggtttattcgctcttgtcttatcattcgttccattgttcttcctttcctagattccaacttttagttggtatctacatcttaccaactttaagttggattgtcaagaggtgtatttatggatttcagaaaaaatttttcacagcgttttgaattactcaggaagcaaaaaggcgtatcccttgccgctctcggtgaatatttgggagtaaccgatgaagcagtacggctgctcgaaaaaggtaaacgttctcccagctttgaagtgctttgctctcttgccgattactttgaagttcccgtggattttttaatgggaaacaacggagctaatcttacaaaagcaaacttagttggcgctaatatgcgcggtataaaagcttgtggtgctgtttttatagaagctaacctgacaaacgctgatttacgtgacgctgatttgcgatgggctgattttagccgcgcaattttaaatggagctaagcttgaaggggctaaactaaaaggcacagtatttactggtgcgaatgtatcaggaacaatactggatggcaaaattgttaatgatgaattctcagaataaaggttttttaaagcgcttttccatcttatccgcctcttgctgtaacagctctaacagttcggcaggcaggcggattgttgtttgttcgcgttccataattctctcccctacgctgatttattattctgcggcggctccggttttggggccgtccttttttaattgttttttcgacaaacaattgccttattaaagctaataagataaaataattaaataaggcggtgattttgtgaatgagcaagaacaaaagaaaatttttgcactcactgaggaaattaactccttagttgaaaaagcagaaagcagtgaatcatatcttgaggcgcgcgggttgttgacgcgagcgctagagctttgtgccgggcttaaaccctattgcgattccggcgatgtaacactgcgcccatcctatgatgaatataccggcgggatacagaaaagcattgacctttgtaatcaaaaattagcggcagaaccagaacaatataacgaaccaacgcttgatttggatacgttggatggaattgaaataatagatgaattacttgatgcaatcgtaactcccctccatccttctgaattgagtgcagacatggatttttttacggttgaccgcccggtgacagatgggaactacgaatattacacacatgaaattttcgagtataaatgttgtcttttggctattgcctgttttcaattaaaaaaacatttggtttcaaattctcaccgtgaaattaaactcaaaaaaaaatatcaaaagcgaatggagagagtggcgaataatttactcaaggattttgttttgaattgctttccggaatccagtgagacatataaaaaaatttatcttttcgatattacagaaaaagcagaagacaagtttcggcgctatactcgattccaggccccatttggccgaaccacaacgagcgagtacgaggtctccaacaacttgttttatttacgtatgaagatgcaaaggcttaaaaaagccgacctttttattaagtatggctgtgttgcaaataacgaaaaaacaaaatttgataacttatggaagagcacagaggacgaagttttgcggttgcagaagttaaatgatcgatacacagagtaccgcgcgattttatgcgaaagaaaatctagaatcgtcagcatctttaataaaaagtggttagaaccttcgtactctgaatttatagctatagaccttgaaactacaggtttagataggctcaatgacagaatcatagagttttccgggattagatacgtcaatgggcaggaatgcgaaagattaactatgcttattaacccccacatccccattccgactgctgcgacaaatataaacgggataaacaatcaaatggttatggatgcaccttctattgagcaatcacttccgacaatcttgtcgtttttgtctggtaaaattttagttgcacacaatgcaaacttcgacgtcggctttttagaaactactgctcgacgtttgggcatagaagtttattggaattacgttgatacaatttccatagcaaaaaagcttttaccggggctggagaattacaaattgaaaactgtacttgataaaatcggttattccccagctttgtatcacagagcagaagaagactgtcgtggttgtgcacaaatcatgctactagggttaaacagtttaatttaataataatctaactaagccgatttctggttgcctgaattaaaaagccattcaagcctatattctgggaaaaattccgaggtagcggttatctcagaataagtgaattcagtttcaccatttaatttgtgccgagttgaagattcgcaagctccaattatttttgcgtacatgggtatggttatgtgcttttcttgcagtgcttttttaaggttatcaaacatatttatcacctccaatttaccccataaggtaacttacaggtatataatataccccgtgtcgtaaaaagtcaacgtttttttacggcacggggtaaaaaattattgatttgttttgatttatgtgctattgtttataccgtaaggagggaaaactatgaatttcacggaaaaactcgattctttaatgcgggagaaaggaataaataaaagcacgttatcaaaagaaagcggaattccttacacaacaattgatggtttctataaaaaaggcaccgacaacataaagctttctactttaatcaagttatgtagatattttcacacaacattagatgacttggtgcgcgaagatgagttacccgccatgtcaaaaaaagacgagcaacttttcaaagctttcagtaaattaacagcaactgaaaaagaaaactttttgaacctaatccaatctataattgataatcgctaaactcttcaagtatgcatttaattaggtttttcaattcattgtctgcgaggcaaagtattattttaaactgcagatctcttttttcttcttttttgatttccttaacatccatttgtacatcctccaactccttgtctattaaccattatagaacatgtgttctatttaatcaatgcgttttcgatatgctgtcccttttacggaacagtaaaatattactatccctcctattgcttttacttaatagacgcttctgatggcaaaatagcaacagaatttagcaaactgtttagtaaattatgctaattgataaatttgcacatcagaaaacataatctttgtcgttttttgtcgaataaaatatagcacgttgggattaagaattaaagggggttggtaagtttggtagcaaatctgtgatgtttggtaattttttaagtgtattatacataaaataccaaattatggaaacggctataggccaaaaaacgaccgctgcgagctggcactcgcaacggcctgaataaaggtattgtgaaggcatgtcactccttcgacgaaataattatatatgctttgtagagaaatgtcaaattctgcaagtatataaatatcggaggaatgaaattatgaaatgtaacaaatgcggttgcgactatgaaagcgggaatttttgtcctgaatgtggatttccagcaggggcagaatatcacaacgaggttcttgaatctttcggcaatatgtcgaacttacaagctcccgttccgcaaaagaaaaagctaaaaccgtggcaaattgtgctgattgttttaggcgctttggttcttataggcataatcagtggcattgttaatggcggtaaaaacaaagatagtagtagcgctttccaaactcgagcttcgtcaaacgtatctgacaatgtatccggcaatggttccggtgaaacaaccgaagcacctactctacccaaagatgtaacgaaaatagattatttaactgtatatgaaaacagcgataaatatactgataagtatgtacagtttagcggaaaaatcagttcgataaatgataataggttattatttaccgaaggtatttccggcataaattctgtttccgttgaacttgccagcactgacgacttaaaaaaagaagaatacgtgactgtggccggacgtgtggatgataagatgcttgggaacctttatataaaggacgcagtattgatagtcagcggaaaagatgcaaaaaacagctataactcagaaatgaacaaacgcaaagaagctgaaaaaaaagcagccgaggaacaagcgaaaaaagaaaaagaagcaaagcaagacttcattaatagctgcaaagaatattcctataaggatatcgcccgcaaccccaaaaactacgagggcaagcccgctaagtttagaggcgaagtagtccaagttcaggaaagcggtgattttgtcgttctccgtgttaatgtcacctatgaagcttttgagtatattgatgaaggtatctggagcgatactgtttacgttgaatatacccgaaaaagcgattcagaaagcagaattttggaagatgatattataaacatgtacggcaccataaaaggaacaaaaacgtatgaaacagtaatgggtaacgacatgactattccatatcttgaagcacaatacataacgattgagtaaataaaaacaccgccctcccctgctgcaacaggaaagagcggctaccgtacagcagggctgaacggcacgatatgaatcgcaaccatattgtaccatttctgccctgttaaatcaacagggcttcgttgcgcccatttttaggaggttaggacaatatggctactgcaaaaaagttgccgtctggtaattatcgcgtattgctttatatcggtaaagacgcggacggaaaacgtaaatacaagtctttcacagggccgtcaaaaaaggacgttgaatatcaagccgctgcttactccctaaagacgcagcgcgaagcggccaatatgacggtcggcgaagcaatggacaagtacatagaaagtaaagatacggtattgtctccctccacggtccgcgaatacaaacgttccagggcgcgcgatttgcagaatgtaatgaacatcccgctgagcaagctcacgcaagagatgatccagaaggaaatcaaccgggaggcaaaaacgcactccccgaaatcagtacgcaacatgcacggccttctatctgctacgcttgacgcgtatttgcccgaatttcggctgaaaaccactttgccacaaaagactaagcctaaaatttacgtgcccacagacggcgatataaaggtaataatggaggcggcacgcgaaacagatttatacgtgcctatcctgctcgcggcgtttggttctcttcgccgcagcgaaatatgtgggctggacaaaacggacacggaggataatccgatacacgtatgtaacgcaatggtgcaggatgataacggcgattgggtaattaaaccgccgaagagctacgccggggacaggctcgttaagtttcccgaagcgatattcaaagagataaaaggctgggcaccaaacttcaatcccaaccacattacaaatggattcaagcggctgctagccaaaaacggcattccgcattttaaattccactccctgcgccactaccacacatcaatcctgcacgcgctcggtatacccgaccaatacattatggagcgcagcggatggtcgtcagacgcgccgctcaaacaggtgtataggcatactctaagcgataaaacgcaggaaacaaacaaggttgtatttgaccactttgaaggccttatgcaacacgaaatgcaacacaaaaagaaaaagaccgctaaataagcggtctttgtggtcgggatgacaggatttgaacctgcggcatcctgctcccaaagcaggcgcgctaccaaactgcgctacatcccgttaatataaaagcctgccacataaaatgacaggctcttggcgcgccagaagggactcgaacccctgacctcttgattcgtagtcaagcactctatccagctgagctactggcgcaaaaatacaactcaaaaagagctgctaaagtatattaccacatctcaaattaaaaatcaagggtacattttaatttgtggcaaaaaaacaagccataaactgctctatgtaatgttatcccccgctttcaggcatactgcccgccggcgggggaacaaccatcctttaatcgttactatgcttcaaaaaacgaagtaaacgcccggtacgccatatagaggtcgaccttagatgcgacctcaaacggggaatgcatggacagtacaggcacacccaggtcaatgacgtctacgttcaggttcgcgacatattttgcaatcgtcccgccgccgccctgatcgaccttgccgagttcacccgtttgccagaggatattttccttgtcgagcagcaggcgtatctccgccataaattccgctgacgcgtcggaggtatcgtatttaccgccgtgtcccgtgtattttgtaattacgacgccattattgaggtaacaggaattgttcgcctcgtacacgcttgcgtacgtcgggtcgaacgccgcgtttacatcggcggagaggcacttgctttttgagagcacccggtaaccctccagcccctcgctttttgccaggtcaaagatgaaatatttcatataatcgctctgcattcctgtgttcccgtcgctgcccgtctcctctttgtctaccagaacggtaatagaggtctgtctgggggtcttgcagccgattgccgccatcagcgccggatacgcgcagatgcggtcgtcatggccatatccgccgaccatgctgcggtcgaagccgatatcccgcgctttatacgccggaacaagctccagctccgccgaaaggaaatccgcctccgtgattttatactgctcatggagcagattcatgatgttgagctttacaagctcagactccttatcgtccttaaatgggcggctgcctatcagcacgttcaagtcttcgcccgtaaaccctttcgccatagtcttcgcgttttgctcctgcgcaagatgcggcaggaggtcagtcacgcaaaagcacggctcgtcatccttttcaccaacgcagactgaaattttctccccgtttttcagcacgaccgtcccgtgcagggcaagcggaaccgccgtccattggtattttttgattccgccgtaataatgcgttttaaacagggccaaatcgtttgcttcgtataaggggttcggctttaagtcaaggcgcggggaatcgatatgcgcgatagcaaggcgcactccgtctttgcatccgtctgtgccaataacggcaagcattatattttttccgcggtttatcgtgtaaaccctatcgcccggttgatattgtttgccgcagtcaaacgccgtaaatccggcgtcctttgctatttgttcagccgtgatgactgcctcacgttctgttttcgcgcagtctaaaaactttttatagccggtgcaaaatgcgtccgcacttgctatttcgtctgcgccgcgcgtagaaatcccatttttcctgtcaagaaacagctcttccttgagctttgctgcctgtgatttttcttctgccaattcatatcaatcctttccatgctttattttaccctgattgcgccatgttatcagaaactgttttacagctggtacagctccttatatttttcacgcgcgttttctaccttaaccacatagtttgaggtttcattatagggaatcgtatccaaatggacaccatcggaagaatactggctgtcggaaagccagctgtccaccgcgccgaaacccgcattatacgcggcaatagccgcctgctcgctttcgtagcgctccagcaaaaactttaaaaatttcgcgccgtaatcgatgttggtttccgggtctgtgagcttatccgcccccatcgtaatttcgccgtcataataggtttgcagccattcaaaggttgtcggcataatctgcatcaagcccattgcgcccgcatgtgaacccgcctccgggtcgaatccgctttccgttcggatgactgcgtatatgagggctttgtccactccatagctttgggaagcggcagttacttcgttttgatatttcagaggataagccgattcctgcaggtcgttctgcgcatttgaaaacgcgtaaatcgcaacaataattacgacggccgcaaacaatatggaaaacgccgctacggtgaaaccagtttttcttttcctgctcatcctccaccaccttttttttgtttaagctcctctgccgcaagccttgcttcgtgcaggaccatttccagcggctgggaaccgttaatcaccctgtcggaccgggaaatgtaaaaatcgtcgtcatattgggcggaaagacgcaggcgcgcctgctcctccgtaaggaggtcgcgctccataatgcgcttgatgcgcacgctttccggcgcgacgacggaaagtacaaagtcacacataacatccgcgttgctttcaaataaaagcggcgcgtcgaatacaaaatacgtatgcctgcgctttcggtatccgtttacaagctccagcgtccgcaggaacacccaagggtgcacaatgctgtttaaaagccctgttttttcgcgggaagaaaatgcacgctttgcaagcagccgacggttgattcctccgtcaggtgtgcggatgtcctcaccaaacgcaccgcatagctgcattacgcaggaagaaccgggtgcggccgcctcgcgcgaaagggcgtcggcatcgataatcgtccatccattttcatgcatcacctgtgaaaccgtgcttttccccgcacctgtcgggcctgtcaggcctacaattacaaaatcacgcaagctccttcacctcaaatccggcggcgcgtatcaggcggttatacaccgccattccaaccccgtccgtgtcgggacagcgcgcatatacgagcgtcatcccgtcgtcgtcaatctgccgaagcgttgcgaacaatattcgcgcctggcgaagggtgtcctttttcgcgcctagcggatatgccttacctgcacgcagcgccgcaacatcttcgtcaaaacacatacacgcggtatatccgtccgcgtgactgtttacataatcaatatatttttggccgccggcttttattaatataacgcgcgctttcggcgcataatgcttgtacttcataccggggctcgcggcctttgcgccgtcatcaagccggtgaagcaccgcgtcatccacagcgattccgccgataaccgcttccatctgctcgagcgtcacgccccccggtcgaagcaggcgcggcctgtcttcagctaatgtgattacagtcgattccacgccgacactgcactgcccgccgtcgagcaccgcctcaatacggccgtccatatcgcgcagcacatgctgcgccgtggtggggctcgggattccggaacggttggcggagggcgccgcaagcggtgtgccgctttcccgaatcagctcttgagcgagcggatgtgccgggaagcggattccgaccgtatcaagcccagtgctcacttcaactggaatcagctccgattttggaagcaccatcgtcagcggcccgggccaaaagcgggaagcaaggagccttgccttttccgggaactccgccgcgagccgttccaaatcctctatctccgcgatatgcacaatcagcgggttgtccatcggcctgccctttgctttgaaaattttcgcaacggctttaccgttgagcgcgtccgccgccaggccgtatacggtttctgtcggcatggcgaccaggcctccgtttcggatgatttgcgccgcctcattcagttgtccttttgttaatatttgagttttcatcatacgccattctttcgttaaaatcaaagaacgaattgtaaacttttgcctgcaatatcagcccggctgctctttcccaagctgtttagcacggtccgccgtaattagcgcgtcgaccaccatgtccaaattgccgtttaatacgtcctcgagctggtaaaccgtcagcccaatgcggtggtcggtaatccgcccctgtgggtaattgtacgtgcgaatgcgctcgctgcggtcgcctgtgccgacctgtaaccggcgttccgacgcaaccgactcctcctgttccctgcgcttcgcgtcgagcaggcgggactttaataccttcattgccttgtccttgtttttgtactggctccgctcgtcctggcattccaccacagtacctgtcggcaggtgtgtaatacggatggccgattccgtcttattgatatgctggccgcccgcgccgctgctgcggaatgtatcaatctgcaaatccgcaggattgatttccagctccacgtcctccgcctccggcagtacggcgaccgtgacggtagaggtatgaatcctcccctgcgactctgtttccggcacgcgctgcacacggtgcacgccgctttcatatttcaaacgggagtatgcgcccgagcccgtgaccataaagctgatttccttatagccgccgagctccgtttcgtttgcgtttaaaagctctgttttaaagccgcgtttttctgcgtacatcgtgtacatcctgtaaagcaccgcgcagaaaagcgccgcttcctctccgccggcgcctccgcgtatttcaacgataacattgcgctcatcgttcgggtcctttggcagcagtaagagcttgagctcctcagaaagcgttgccaccgcttccctcgcttcgctcagctctgattcggcaagctcccgcagctccctgtccgggccgcccgcgtcaaggatttgccgcgcttcccgttcggaccgcacggcgtttctatattccctgtacttgtctgcaatcggctctaaggccttgacttccttcatcagctttgcgtattgccccgggtcggctgccaccgccgggtcatagagcttttgattcaattcctcaaaccgtttttccagtaccgttaatttatcaaacaagcctgtcatccgccttttcttgtaaaattcatcaaatatggcagatacgctaatgctcttcccgaataattttttttatattcttttccgccttggagcgcggcagcatgatttgatggccgcatttgcagcattcaattttaaagtccataccgatacgccggactaggaaccgtttttccccgcacgggtgcggctttttcatctccaggatatccccgaccctaacgtccatgcacggcgcctccttttcattctagattaaattttattataccattttattgcgtggagtacaaccggatgcatctttcaaaaattttagtggtttaaagcaacaaattgccggaaacctattgacaaaatccattttgcgtattatgatgatgcaaacagcaattgaaagcggaggcaacggtatggtacgcagcatgacaaaacgatttacaggttttgtcgctctcaactattattatggttgggattttttgcgttgccctgtaaacagacagtaattttactgctgtagctgccgctttcttttttaaaggcgttttacggggctgaaaccattcagccccgttatttttttgtaacagcgggtttacccgcactgaaaggactggtcattgatgataatcgtactcaaaccacagtgcagcgaagagcagctaaggaagttcaaagagcagctgaccgatacctacggcgtaaaggtcaacacatggaacggcgtgcattccaccgtgctgggcctcataggggacaccaccgcaatcgatatcgactatatcaacgcgcaggatatcgtagcaaacgtacagcgcgtgcaggagccatacaaaaaggcaaaccgcaaattccatccggacaattccgtcattacgctgcccaacggcttaaaaatcggcgacggcagcctgcagattatggcggggccgtgctccgtagagggcagtgagcaaatctgcggcatcgcggaaagtgtgaaaaaatcgggcgctacgatgctgcgcgggggcgcgttcaagccaagaacctccccctatgcgttccagggcctcaaggcggaggggctcgaccttttgaaagaggcgcgcaaaaagacagggcttcccatcgtaacggaaatcatgcgcgtgtcccatatcgacatgtttgaaaacgtggacatcatccaggtcggcgcgcgtaatatgcagaacttcgagctgttaaaagagcttggcaaaaccaacaagccgattttattaaaacgcggcctttccagtaccatcgaagaatttctcatgagcgccgaatacattatggcaggcggaaacgagcaggttatcctctgcgagcgcggcatccgcacctacgagacatacacgcgcaacacgctcgatatctccgccatcccgattcttaaaaagctgtcccacctgcctgtggttgtagacccaagccacgcttccggcaaatcgtggctggtggaatcgctctccatgtcggcagtcgccgccggcgcggacggcctgctgattgaggtgcacaacgaccccgcgcacgcgtggtccgacggcgcacaatctttgacgcccgcacagttcgatacggtcgccaaaaaggttttcagcctcaagggctatttgcagagcgtgcaggagcctgaagaaaaaaaggaagaagcaaaggcatgaacattgtaatcacggggctgggcattatcggcggctcgtttgcaaaggcaataaaaaaatatacaggccacagggttattggcatcaaccgcagtgaagcgccgcttcaaaaggcgcttcactgcggcgcaattgacgaaatcggcaatacccagtcacttggcagcgccgaccttgtcattttatgcatatacccggcggccgcagtagagtttatagaaaaaaacgggcgctatatcaaaaagggctgtattgtggccgacacctccggcatcaagtccgctatctgcccgcagatgacggcgctggctgataaatttggctttacgttcgtaggcagccatccaatggcgggcaaggaaaaaaacgggttcgacgtttctgacgccgacttattcaaaggcgccagcttcattgccgtcccgtgcggggcgccgcaggcggcggtagatacgcttacctcccttgcgctttccatcggtttcggcggtgtgcgcataacggacccgcaggagcatgacaggatgattgcgtttacatcgcagcttccgcatgtgcttgcatgcgcgtatgtgctgagcccgcagtgtaaaaaccacaatgggttttccgccggcagctaccgagacgtttccagggttgcaaacatcaatgcgccgctctgggcggagctttttttagaaaacaggcagccgctcacctcggagcttgatttactgataaaaaacattcacgccatacgcgaggcagtcgatagcgaagacaaagaaaagctcactgctttgctcgagcagggcagaaaggtaaaggaggcgctcggggaatgaaaacgctccatgtaaaaacaggacggccttatcacatcctcattgaaaacggtgttttaaaggattgcggcgcatatatcagaaaatgctcgcgcgccaagcgtgccatgataatctccgacagcaacgtgttcccgctttacggaaacgctgtttccgactcgcttgtatcaaacggctttgctgtattcacacatgttttcccggcgggcgagcaatcgaaacgcctttgcgctattgaggcgatgtacacggatttggccaaaaaccaatttacgcgcagcgacctgattgtggcgctcggcggcggcgtgacgggggatatggccgggttcgccgcggcaagctatctgcgcggcatcgacttcgtacaggttcccacctccctgcttgcgcaggtggattcctccgtcggcggtaagacaggcgtggacatcgaggaggggaaaaacctggtcggcgcgttctggcagccgacgctcgtgctcatcgaccctgacacactcgccactttaccgccgcgcttttttacggacggtatggcggaagttataaaatacggatgcattaaaagcatttccctttttgagcagcttgagcgctgtgatatcaaaaacgaagtcaatgatattattttcaagtgcgtcgatatcaagcgcgcggtcgtcgagcgcgacgaacacgaagcgggtgagcggatgcttttaaattttggccatacactcggccattcccttgaaaagctttatcattacacaggccttacccacggcgaggctgtggctgccggtatggcgatgataacgcgcgcgtccgagcacgcgggtatgacaaaggaaggaaccactgcccgccttgccgcgctccttcaaaaatacgggctgcctgtaagcgaccccgctgactgcaaaatggctgccgagggcgcgtttacagacaaaaaaagcagcggcagcgatatcaatattgtcctgctgcgcgaaatcggagacagctttacaaagaaaatcgcaaaatccgatttttacggcttttgtaaaataaatgaaaaggagctttccctgtgagcaatgtcgtcattacgcccgctgcgttaaacggtgcgattaccgtccccccttcaaaaagcgccgtgcaccgcgcggtgctgtgcgccgcgatggcaaagggtatgagtaaaatccgcggtgtggacttttcaaacgatatcaaggcaactatttcctgtgtccgtgcgctcggcgcggatatccaggccgagggggacacgctcaccatagacggcacgcgcctgttttcccaaaagcaggcggagcttaactgcggggaatccggctcaacgcttcgttttttgattcccatcgctgccgcgggcgccgttaccgcctgcttcacaggctgcggcaggctcccgcaacgccccatcggcatttaccttgactgcctggcggaaaagggcgtctccatgcagacggagggcggcctgccgcttacggtaagcggcgccctgtgcagcggcgtatactccctgccgggcaatgtaagctcccagtttgttaccggcctgctgctcgccctccccctgctcgggggagacagtgaaatcaggcttacaagcccgctcgaatcggcgggctatatcgatatgacgatagaaaccatggcgcagttcgacgtccaggtacaaaaaaccggcgccagctattttataaagggcgggcagaggtatatcccgcgcgacataacatgcgagggcgactggtcgcaggcggcctttttccttgcggccggtgcgctcggcggcagtgtaacggtacagggcctaaacctttcctcagcgcagggcgaccgcatgtgcgctatgctttttgagcagttcggcgctaaaattacatacggaaaaaacagcgtaaccgccgaaaaaagcgcgttgcacggaatccaaatcgacgcgcggcaaatccccgaccttgtacccatcctcgctgttaccgcggcctttgctgacggtacgaccgtgattatgggagcagagcggctgcgcattaaggaaagcgacaggctcaaggccataacccaagggctttgcgcactcggcgcaggcgtaaaggaaacagacggcggtttaatcatcaccggcgtttcctccctttccggtggaactgcgcagggctataatgaccaccgtatcgtcatggcgctttctgtcgccgcaataaaagcggacggtttggttaccataacagacagggaaagcgtcggcaaatcgtatcccgcgttttttaaggattataacgcgctcggcggcaaagccgcatttgaagcagaataaaggagagagcaatatgtcatcaagctggggtgaacgggttaaaatcagcatatttggagaaagccacggggaaggcatcggcgtggttatcgacaacctgcctgcgggacacaaaatcgatatggagcaggtgcgcggctttatggaacgccgcgctcccggccgcgataaattcgcaaccccgcgccgggaggacgatatcccgcgcgtgctgtccggcatgcttcaggataccacgacaggcgcgccgctttgcgccgtgattgaaaataccaacacgcgctcaggcgattacaacaacctgcttgcaaagccgcgccccggccattcagactatcccgcgttcctgcgctatgaaggctttaacgacatccgcggcggcgggcatttttccggcaggcttacggcgccgcttgtcttcgcgggctcgctgtgccgtcaaattttagcggaacaggggataaaaatcgcgtcacatatcagccaaatcggccaaatcaaggaccagccgtttgaccggcttgaaattgaagacgcgctgattgcgtccctcaaccaagctccatttccactgattgacaagacagtagaagctttgatgcgtgattatatcgaacaggcgcgcatgagccaggacagcgcgggcggaattgtcgaatgctgtgcggtgggcgtacccgcagggcttggcagcccgatgttcggcggagtggagaacgtaatatcctccattgtattcgggatacccgccgtcaagggcctggagttcggtacaggctttgggtttgcttccctccacggcagcgaagcaaacgacccatatgcttaccaggacggcaaggtcgttacgctaaaaaacaataacggcggaattttgggcggcattacaaacgggatgccggttctatttcgtgcctgtgtcaagcctacctcctctatttcgcaggagcagaaaacggttgacttgaccgagcaaagggacacgacgcttatcgtcaagggccggcacgacccgtgcatcgtcccacgtgcggcggtggtgctggaatcagctctggcacttgcgctgataaacttgatataagggggcaaaaaacatggagctcgacgcaatccggcaggagatagaccaaatcgacgagcagctaatcgcgctcttcaagcagcggatggactgtgccaagcgtgttggagaatataaaaaggagcgcggcatgaccgtgctcaatacagaacgcgaaaacgaggtactcgataacatggagcgcagcggcggcgaatatggctatgcggcccgtttgctgttttcaaatattatggagctgagccgggctttgcagcacgacattatgggcagcggcaaagagatgcgcacccttttggaaaccgcggaatatgcgcctgaaactgattcgcatgatattagaatcgcctgtcagggaatcaaaggcgcaaacgcgcatgaggctgcgctccggcttttcccaaacgccccggcgctgttctgtaaaagctggaacgacgtgttccgcgccgtgcgcgacggaaaggctgattacggcgttttgccggtagagaattcttcggccgggtctgtttccgatgtatacgacctgatattaaagtaccgcttttttattgcgggcgcgctcgacttgccaattgagcatgtgctctgtgcgctgccgcaaagcgagctgccggatatcgagcaggtttggtcccacccgcaggggcttgcccaatgttcggaatacatagcgcagaacagcctgaaggcggtcccctgctcgaataccgccgtcgcggcaaagctcgtacaggaggaaaagcgtttaaattgtgctgccatttgctcccaaaaggcggcggaggagtatgggctaaaggtgctgctgcgtaatttccaaaacagcagcgaaaactgtacgcggttcatcgtcatttcaaagaagctctatattccaaaggaagccgataaaatcagcctttgtttttcgctgccgcatgtaaccggttcgctttataatgtgctgtgccgctttagctgccatgggctgaacctgacaaaaatcgagtcccgccctatgccggacaaaagcttcgaatacctgttctatcttgatttttccggtaatgttcgcagcgaacgcgtgatgaatttaatgtgcgcgctttctgaggagctgccagagttttcgtttttagggaactataaggagaaataaaaagaaggaaaccagtaaatggtttccttcttttctttataacagcattttaatttctgcgagcgtgatggcttttatcggttatggacggcagatttgtatctttttttggctggaggctcaccatccaaatgccaaagcaaacaagcgcggtggatacgagattgtttacattaaaaatatcctcgcccagcaaaatgcccgaccagattatcccgaacaggggaatcagcaggttataaatgcagattttgctgaccggattatatttgagcagggccgtccatagtgtaaacgcagctgccgatacgaccgccaaatatacaagcaggccccactgcgcggcgctgctgtaataaagcctgccgcccaccgctccgcccgcaattatcaaaaccgcgccgccaatcatcagctgatacgccgtaacctgcatcgcgttcctgccaaccattgcttttttgctgatgaagctcccgcctgcggaacaaaatgcggacagcaaaacaaagccctccccaaaaaaggtgaagcggtcaaatgtaagcccgtcaaaattaataatgatgattcccgcaatcccgagcacgcagccggaaaccttgagcgccgtcagcctgtccgtcctgaaaaccagcggggcaaggagcaccgcgataaacgcgctgcatgcggtcagcacagaggttttcgtccccgtcgtattcgcaacgcccacataggaaaatacgtattgcagcgccgtctgcacaagcgctaaaaatataaccggcagggcgtcgcgttttttcattttcggcggctttttgttcataataaacgcaagcaaaaacaccataacgcccgcaagcgcaaagcgctctcccgcaaataaaagcttcgcgcccgtatcctccgcactcaaatggaacagctggtaggacagcttaataacaggaaaagcagtaccccaaagcgcagtacaaagcagcgcgcacagcggtacgccccatttatttgtaagaattgcttttgctttcattcaatgaacccgtccttatttcggataaaaagcagcgtaccttgtaaaaccacaggcacgctgccattttagaagcagcgcccgtttttgctgcggcggcagctgccgtcagggccgcccgttcggcagcggtagcatatttcgttttcaagcggttcccccgcaaaaaaagcgtttaaattttggatagttgtctgcgcaatattccgaagcgcctcattcgtcaaaaacgcctgatgggacgtcacgatgacatttggcagggatacgagcagctgcagcacgtcgtcctgaataaccgaaccggaaaaatcctcaaagaacagcgcggattcttcctcgtagacgtcaagacctgccgcaccgactttctgttccttgagcgcctttaacagcgcttcgctttcaatcagagagccgcgcgacgtattgagtatatacacgccgtccttcattttttcaatactctgcgcgttgataatatggtgcgtgctctccgtcagcgggcaatgcagtgaaatgacgtcgctctgtgcaaacagctcgtcgagcgtaacgtagtgaatacctagcccttcggctggatacgggtcgtacgcgatgacgtccataccaaaccctttgcagatatccatgaacacctgcccaattttacccgtaccgataattcccgccgtcttgccgtaaaggtcaaagcccgtcaggccgttcaggctgaagttgaaatccctcgtcctgttataggcgcggtggattttgcggttgagcgtgagcagcaaagccatggcatgctccgcaacggcatacggggaatatttcggcacacggacaatattaattttttgaaacgccgccttgaaatcgatattgttatacccggcgcagcgcatggcgagcacccgcacgccgcagtcgtagagcgtgtcgattgccgtttgattgatatcgtcgtttacaaacgcaaccgcgcccgtacacccctttgcaagcccggcagtatcctcgtcaagcttattttcatagtatttgaacctaagctcaggatggtccagctgctcaaaccaaagcttgtcgtatggttttgtgtcgaaaaaagcaattttattcataacggaaagcctccttatcatctcaacgcttcattttatcatagttttacttcatctataatgaaaacagcgtggcaagcattattatacgcactttccggcgcatatattatacgctcgattccttatcatttccagcataattgcaacattatacgccaaactattataaaaacagaagccggtaaaaacggcattgtttacttgggctccctgtttgcaggcatccgccttcaaaccgcgcaggcgcgtgaaagcaaaatcacagattttgcgggagccctccaacaaactgaaaaggagcctaccaatatgaccaagcaccaggaatttttactctgcgaaaaatgcggcaatcttgccgggctgattcgcgacgccggcgtaccgctgtactgctgcggtgaggaaatgaaacgccttgtggcaaacacatctgacggcgccgctgaaaagcatgtcccggtcgccgatatcgacgggcgcgccgtccatgtctgtgttggagaaaacgagcacccgatggaggacgaccactttatcccgttcgtctatttacaaacctgctgcggcggacagcgcaagtccatccgtccgcacgaggcgccgcgcgttgagtttgcgctggcagacggcgaaacacccaaggcggtttttgcctactgcaacaaacacgggctttggaaatcggagctttaagccctgacaaaaaacaatacttgtattccacaaaaaaacaaaagcgatgagacgctacatctcatcgctttttttattattcagccatggcataaataaaaaagcttttactttttattcaagccttgtaaaacacacaggaaacacgcaatcatttctccaggctgccttccccgcccatcagggcggtgagctcctcgatgcgttccagcgggaacggcggaagcgtcaaaggcttgagcgcgatggacatcagcttcattgggttgtcgtccgccgccacccggttggaagaaaggcttccgcagctccggcagcggtgaataatagcccattcaccgttttttctcacccaaacgcttaccggctccataatccccccgcagtccgattcccggtccccgggttcgatgtccacatggaggctgctcaggcagttcggacagtggttgcggtggctgctgccggcgccttccggtacaacctgccttccgcacaccttgcaggtaaaaatatcgctgcagccgtgtgttttataatatcctttttgaaattgttttcttttattttcccgattcatggaatattcctcctaaagatttaaaaaatccttatgggaggatttgcgggagtcagtttgcgcaaacctcccggtttgcagcaatctccgttaatttattattacgtttcaaaaaaaacactccttttattagtttagattagaaaaaatatacacagccggcgttataacaaagcctattggaatgccggatttgtttggccggttacataagctccctttggaattgttcaataatacccaaaagctttgggtcaagccgcttatgcgactctatttccatccactcagggattgttccataaaacgcctgcgcaatcccgcccgcaacgcaggcaatggtgtcgctgtcgccgccgaccgcaattgccctgcggaccgcgtcttcgtaggaatccgactcaaggaacgcggtaatcgcaaccgggacagaaagctttgtcctgctggaaaagcagtaggtatccctgatatcccggagcttaaaattcaggtcatagccggctgttttttgcacaaaacgcctgatttcaccttttgtttttcctctgcgcgcgagaaaaatagaccccgcgaccgcctgtgccccgctaatcgcctcacggttgttatgggtgtaaaggcagcttcgctccgcgtggctgagcacatcgtcgagccggtcaaacgcaaacccaatcggggatacgcgcatggacgccccgttaccatagcttccctgtacaaacagcctgtcgtcctgcgcccattttgcaaacgcggcgccatagcccgcgtccgggtagcacgcataaaaccgtttataaagcgttgcatataccttcgaggtatactcctcggcgatttcgttattttccttaagccagagcaccgcttccgccgtcgcgcaggacatcaccgtatcgtctgtaaaacggctgccttccccgaacatttcaaaatcatctgttttgacattgttccattcataggccgacccggcaatatcaccgattacagcacccagcatggaggcaccccctcaatttccgccaacacattttaaatatgctccccgtcgtcctccggcatgagctttggaataaagcggtcggcaaatttatttttcccgcggcttttaatataaaagaacccgataatggaaaaggcaaccgccccaaagaaattgacaatcaaatccttcatcgtatcaatcaggccgatgtccagataagcgcccagcgtataaaccgtcccgtccgccgtttttatgacggtttgcgtaatatcgttcacgggaattggaatattccttccctcgggatggagggataccgaagcaaactgcgttacgaacgtgtccttctgcatatctgtgtgcaggagcatatccgcgccaaactcaaagaactcccagaggacgccgatggtcatggaaaagcaaaacgccacaaccgctaggaacacgggcgaaaggaaaaattttgttcgctcgctcctgttaaaaatatcgacgagtgaaaagccgattgccgccattaaaaagccgttaattgtatggagcatggtatcccagccgggaatcagcacataaaactcgttgatttcccccaagatttcagccgcgaagataaacaggataatcataacctccagcgtgttgggcagctctattttcaggccgcgctcaacaaatgccggtatcataaacaggataagcgtcagcacacagacaaacacattttcaaaattgcggttgagtacctggattacaatcatgccgataacgaacaggcgaatcaagatataaaaaataaatttccctttattctccttgatatttttttttgccataacccgttcgattcgttttctctctttatccttcaatgccactactcctccgccttatttatgccccctggtttttggggcggtcagattaaagctgtcggcgaccatctccataaggtcctcccgcggtatacccgcattaagctccactgtattccaatgcgttttgttcatatgccacgccggcgtgacggcctgatacgcgctgcgccaaaagccggccttctgcgggtcgcatttcaggttggcgcacagcttgccatcgcgtataaaaatcagggcaaaccatttcctgctgcctgcgtgccggacgacggtgtgctcgtcgccgaacggctggtctgtaacgctgctgccaaaagaagcacaaagcgttaaaaattcctgctttgtcattttttctccaccatattatacgcccggccccgccctaacatgttttttgttttctgggataaagccccgtccggacaaccttggcagccgtctggctccgaacggcggaaaataaattctgcgtatattttctcctggacctatcataacgcatttccgggaatgaaacaaggaaaaccgccatttttggcggtttttccaaatttaatgcggcaatgccctttctgttttctattacgaatcacacacggcaagggtttacccccctcctgtgttttctgctccattatatgccaagcagcagctttgcaatctggaaataaacaagcagcgatatcgcgtcgaccgctgtggtaataaacgggcttgccatgactgccgggtcgaagccgactttttttgcaagcatcggcagcgtacagccgataacctttgcaacgatgaccgttaaaataagcgtcaggcagacgaccgctgcaatctgcatactcacccggtcgaaaaacatcagttttaaaaagttggcagccgaaagggttacgccgcacagtacggcgacgcggctttccttccatatcaccttgggcaggtcacggaattcaatttcacccagcgatatgccgcggataaccgttacggacgcctggctgcccgaatttccgcccgtatccatcagcatggggataaaggcagtcaggacaacctgcgctgccagcgcgtcttcaaatgaagtaataatcatgccggtaaacgtcgcggaaatcatcaaaatcagcagccatgggatacgcttgcgccacgtctcaaaaacgccagttttcatgtacggcttatctgtcggcgtgatagcggccatcatttcaatatcttccgtcgcctcttcctgcataacgtcgatagcgtcgtcgaccgttacgatgccgaccaggcggttttccccgtctacgaccggcatggcaagaaaattatatttgcggaacatgtgcgcgacggcctcctggtcgtcgagtgtgccgaccgcaatgacgtgcgtttccataatgtcccgtatgacgtcgttttcttcagataaaagcagcgtacggatagaaacgatgccaaccagcttgcggttgtcttcaattacataacaggtatagattgtctccttgtcaacgcccgtcctgcgtatccgcttgattgcctccatcaccgtcatatcagggcggaagctgacatattctgtcgtcatgatactgccggcgctgtcgtccggatacttcagtatctcgtttatcatttttctggtgtcggggtctgcctggcgcaaaatacgtttgacgacgtttgccggcatttcctcaatcaaatcgaccgcgtcgtcgacgtacagctcatcgacgacctccttgagctctgtatcgctgaagccaaggattaaaagctcctgcatatcctcgtccatctcgacaaaggtttccgcagcctgttcctttggcagcagccggaacagcagcggcagcgcgtcgtcctctaaatcgtcgaacagcgcggcaatgtcggcagggttcatcgtggtcagaatgtccctcagggttgtgtactttttcctttcaagcagcgatgtaatcgtatcctgaaagcttaccggattcctttccattggtctctcctcctaacttttacatttggttattaggcagaagtacgacacaagaaccggtcaaagcaggctgggtcaaaaaaagcggacgcgcgggcgcgcacaccttcttttaccgccgcttcgcccgggtactgtgccgctgctacttcctgcgtccatcttttttcacccctttaaaattaaaattcacatacgaatttattttatacctaaaaagaaataatgtcaacgccgtacccaaccgacacggcgtttttttatcttttgagagaaataaaaacagcggttctgtcccgggttaaaggacaaaaccgccaggccttattcaaacgcgtccatccatttgagcaggcgaatgcaatcactgaagcccttgcggtaaatccactcctcctgcgtactgtaaacggaattcgctgtttcctcaaactggcgcatcagccggtaatcatcccccagcttgttttcgatttcatcaaacagcttattatattccgcctgctgctgctcataagcctgccgctgctcgcttgtcagcttttcctctcccgggcggaagctgcagcccgcctgtataaacgcgtcgataaattcgtcagccataaggcaccgccttcctattgttattcctttgcttacgatatggcttcattatattattaataaaccaaaaagtttcaaaaatgtgaaatacgttcattttctttaagttcaaagtacaggtaaattcctttaaagtatttcacattgcgtcttgacgaaccggcacacctcgtccatcggcataggcttacccgcacaaacacagccctgtgggataagggaaccaatctcgtattgccttcccttatcgtaaagcgcacaggcaaaatattcgcggctgatggaaccgggccgaatctgctcatatttttgcggcagggagagggtatacctgtcgaaaacaaccccgcgcacgctgacggcgggcttttcacctgtaaacacgacggtattgtccgaaagcggaagctccatgcggattttttccggcgcgattacgacgtggcagctctcaaggcagccaatacttttatgtactgaaataaacgcgccgctttcctccataatttcgtccgcgcggtcgatatacgccttcatattcccgctgaccgcgttgatgcaggaggaaaacggcaataacaggcggagcatcccgtcgttcaggccgtccgggtcaaacaagccaagccgcagccggtacggcggcagcttcaggcgtgacaaggcctcaagcgccgcgttttccgccatccggtgcatcagtgcgtgggaacggtaacgcttcagccccctcggaagaggaatatccccgctgtacagcacttcctttttgccgtttccaagctccttttcaattttatcccacgcgattttttccctttttcttccgtactccacatggagcacagcaagcgtatcgcctattgtgctcagggttggaacgggcgggttcggcttgaaaaaagccccaacccttccgcataagccctttggaatctcttcttttatggtaagcgccgtaatcatagatatatcctccggtttccaattgagtatcatagatatttttatgccggaaaggaaacctgtattccgtatgggcactataattaaaaatccgccgcggcacaaaacgtgcgcgcggcggattgccttttcttaaacgttggggaactgcgggtattccagcagcgggttgtatttctcgcccatatagcgggtttcaaaatggaggtgcggcccggtggaatggccggtcgtcccaatatagccgatgacctggcccttctttaccgtctggcccgtcgatacagccagcgatgaaaggtgggcgtacagggtggaatagccgccgccgtggtcaatcataatataattgccgtagccgccgccgcacccgcagctgtagctcattggcttgctccagttgtgcgtacaaccggagtatgtaaagacgacggtgccgtcctccgcagagaccgcctttttaccgaagatatctccgccggcaatatcgagcgcgccgtggttcctgctgccgcggtcctcatcccaaagggaggtaaggattgtatacccgggagccggccactggtagcccgtacccgttggcgtaacgtcgctcgtgtctgttgtggaggagcccccgccggaattctggtttttttgtgcttcctcctggcgttttttctcttcctcagccttgcgcttttgctcttcgtaatattccttgatttccttctcgagctttttcagctcggcgttgttctggtcgagctcctcgcccgttttgacctttacatcgtaaagctcattgagcagctctttgttctcttccgcgagctgctggtagtttgcctgctcgccgtcgagatatgcctgctcttcctcctgcgcctgtttcgccgtttcaagctgctccttttcgtcgtttaaggcggccatgctgtccttcaggtcgttaatcaggcgggaatcatgctccgatatattttccacaagctccagcttgtcgagaaaatcggtaaaatcctttgcgccgagtataatttccaggttggtcgtatcgcccgccatatagatggccttgatgcgctgctggagggttttcgtatctttgtcaacctcctgctgcaccgtttcaatatcctgttccttttgagcgatttggttttcaagctccaaaagctttgcgcggctgtccttgatttttgtatccagctcactgagctgagcggccagctcctgctgcttctgctccttctgctcaatttcctcctgcgttttcttttgttccttttcaagctgctcgttctggctctgcaggtcgtcctttttgtcctccataccggaaatatccgttgccgcgtataccacaatctgcgtacaaagaaggcctgcaagcattaagccgattatttttttgaacaattccatcatccttccgggttcatgttcccgttggcgcaaaggaatacctcttcctaaaatatcctttaccagccgagaatttcgtttccttcctttttcaggtacttgcggattgagataaacccgccgaccgcgccgacaagcatgccggctatggcaaacgccgccgtaacgggggccgccactacgttataattgattgatgtaaacggtacgatgtgctgcgcggccgccatgattgcgtcgtacaggaacatcagcagcacagaggaaaccagcccggaaagcagtccaatcaacatgccctcgacaacaaacgggatgcggacaaacgcgttcgtcgcgccgactgatttcataatactgatttcaaaccttctggcgtacatcgtcatacggattgtgtttgaaatgataaacagggagataatccctaagataatgaccacccaaagccccatggtcgccacgagattgttgaggctcgtcagcttttccgcaacgtcgctgcggttacttattttgtccaccccgtcaatctgctggatttccttagcggtctggtcgtagatggacaagtccttaaacgatacatggaacgcgtgcggcagggggttctggtctccctgcatctgcgggaaaacctctcccagcgcgtcctggaattctaaaatagcaacctcttttgaataaaaatcacatttttctacgttaccgtttttttcaatttcactgccaatcgcctttgcctcgagctcgttgatatcgtcgtcgagataaacgtttaccacgtttgaatcgccgaccgaggcgacgaccgactgtacgttcatacagaccagcacggctgctcccgtaagaagcaggcaggaaatcagcacgccgattgaagcgaaggacatcatccggttatgccagacgtttttcagcccttctttaaataaatacccaaaacccttcatatgtcaaattcctttcccgttccacctgttcatacagcaaggcgatgcttattcgtccacgccgtatggttcaagctccttaataagctcttcataccttgccgtgtcgagcgcttcctcctctgcggccccgccgccgagctcagggtgctttgagtcgcttacgacccggcccttatcgatggtgatgacccgcctgtcgaattcggagacgaggttatgctcatgtgtgacgacgagcaccgtcgtgccaatcttgttgatttcacttaacagctcgaggatttcgtgtgacatttcggggtcaatattgcccgtaggctcgtccgcgataatcattttggggttgttgacaagcgcccttgcaaggctcacgcgctgctgttcgccgccggaaagctcgctgggcttgctttttgccttgtcgcgcaggccgaccagccccagtatgtagggtacgcgccgggaaacggcacgcgggcttgccccaataacgcgcatggcaaacgccacgttgtcaaacactgtcattttgtcaatcagcctgaagtcctggaacacgatgcccatctttctgcgcagataaggcaccttcttgcgcttcatgtttgcaattgattcgccgtccacgaagatttccccctcagtcggcgtttcctcatgcataatgagctttaaaaacgtacttttgcccgcaccggacgcacccacaataaacacgaactcaccctcgtcaatcgagaggttcacgttgtggagcgcatgcgtgccgctttggtatgtcttggacacattttttaattctatcataccacaattcctttcgccggaccgcaagccgcctgtctgcggtttacgcgccttcctaaaacgcgccggtccgtctgccaaacaaagtctgtgcctgtcccccctcttcccaaaagagggacggcgtgcctgtgcttccaacattctgaacgaatcccgccgataagccggccccggcccaaagggctatagaagattcaattcttattatagtacatagccgcattaagcgtcaaggcactatcatcccccgtttttcaaaaattcgcatattttcgccgcaattggtaaaaagctttccagcactcctgtaaattcgctgaaacccaaccttttatttgaaagcccagcgctgaaaaaacgggtgctccgatatatattttcaatcatcaaaaaaagccgcccgtacgggcagcctttctccatattaccccagcctgttccttcgtgtttctagaactgcgtcaatcagcctttcggcaagcggcaagtcctctttagaaagcatcgagaccttttccattaaaactgtcaggtttttttcttcacagctcccaaacagcaggtaatcggaagaaacggaaagcgcccgcgcaaccttccaaaggcttgtagtcgtcatgcttttcctgccggactcgatatcggcaagaaactgcgtagaaagctcgcatttctcggacaggccctccctggaaagcttctgttcgcttctcagcctgcgcacgcggcagccgatttgcgcattcaattcatttaacatggaaaccactcctatagaagtattctatcaatatcaacggttaaataaaatcaactatagttattgacattttaattctatagatgtataattagacgaaaaaaacaatgtgaccaaacatcacataccggttaaggaactggggggaaaccttctttctgaaggttttggttccaaaccgcttatgtctggcaattgatgagggggaggcgttggtatggaaaacaaggcctgcacaaattgcaggtatggggagtattatgcagacaaatgtgacgtctggtgcaggctgcttgagaaatgggtagggctgcagggccgctgctgcgaagactgggaatggattgccatagattgtgccggggaaccccaaaacggccgggatagctcctgctgattattgaaataaaaacgcgcatcgcttttttatctgaccagataaaagaaagatgcgcgttttatcatataaaattatctctggctcccggctatgcgggctatgattccttatccgaacctttgcccgccaggctgtgaatcagcttggtaatcagggcgcggtcgtcgtcgctgcactgccgcagctccctgtacaaggtgcgtgcgaataccggatcgtcctcttcttccaaaaagaaatcaaacagggaaatatcgaagtattcgcaaatacgtataatcgtcttcatggaaggcagcgttttgttgctgttgagcgtggaaagataggagtcggatttgcctaaatccctgctcagctgcttttcagacaaatattttcctgccttttctccctgctttgtgcgcaggctgataatccggcttaaaatataggaagtctcttcgtcaattcgcgacataaaacagcgcctcctttttaaattccaacgctttatatttaacaataccagtataatggaaataaacggaatgagaggaacaatattattactcgaattttcacaatttcctgttattcacatattattatgtgatattttaaaaataggctttgaaagaataatataattacccgattttggacagttatacgtaaatccgtctgttcagattaagcccttgcagttttatacatggatttttcgccagatcgcataataaattattgtttgcttttttcgccccgtgaataaatacagaataaaatatgccgccgggaattttcccggcggcatcagcagcccagtttagttttctttttttgaagtaacgtcgtcctcctcaatcagctttttatattgctcatgctggatgtccggataggccgacagcattggctcgacgatacgtggattgtcgcacgccttgcgcttgacgtagttatgcgtgattttaagaacggtgccggagagcgcaagtacgccgatgaggttcggcagagccatcaggccgtttaacgtatccgcaatcccccacgcaaggtcaaggctcatcgtggcgcctacgacaataaacaggacaaacagtattttatacagtacggtcgattttgtcccaaacaggtattccattgccttcgtcccgtaaaaggaccagccgatgacggttgaaaaggcaaacagcaaaaccgcaattgcaagaataattcccgccgcgtctccaaagcgctccgaaaacgcatacgtaaccagcggtacgccctccaccttttctatcttgaccgagctgatgaccgggctgccgttttcatcaacgaccgggtcgccgtggcggtctgtgctttgaacgcccttgactgtcatcacgtttgtaaaaatataatcgctttccgtcttcttctcagccggcagcgtatgtacggaaaattcctgcccccagattgtttttgccaaaaagcttttcccgccgctttcccccttcgtctggataacgacgccgttgtcattttcatcgattaatgggatttcgcctgcgtaatctgcgccgtcggcaatctgtatgaactgcgtctgcgtactgatattctgaagcgcttcctcaatcggcacggcgctgcccgtcgtacttgaaagcaggacgaaggccgtcagggtgcagacgactatggtgtcgaaaaacacttcaaaaatgccccacatgccctgcacgaccggctccttgacgtcggaggagctgttgaccataaccgacgagccgaggcccgcctcatttgagaatacgccgcgcttgaagcccatgtccacagcctgcttgacaatggcgccgcctacgccgccgccgatagattcaaagctgaatgcgctgtggaagatgctgccgaacacatagggaatctgttcaaagttcgagaaaaaaatgacgagcgttccaagcatatacgcgcacgccatgaacgggacgagcttttccgttaccttgccgatgcgcttgataccgccgataataaccagccccgcaattgcggcaagcacgattccggtcacaagatttggtatttcaaagcccatcatcggctcaaacgctgttttcatacaggaagcgatagagttaacctgcgtcatattgccaatcccgaacgacgcgagcacgcaaaacagcgcaaataaaacggcaaggggctttgcaaagtggcgcaggccctttttttccttcagcccgttttccaggtaatacatcgcgccgccggaccattcgccctttttgttctttttgcggtaaaagataccgagcacgttttccgaaaagctcgtcatcatcccgaaaaaggcggatatccacatccagaacaccgcgcccggcccgccgattgcgattgccgtcgcaacacccgcgatgttgccggtgccaatgctcgcggcaagcgccgtggacatcgcctggaactgcgaaaccgcctttttatcctttgttttcgtaacggaacgcttccggaaaatcgcaaggaacgtttcccttgtggtatatttcgcttttcttatctgaaaaaactttgtgcggaagctcatgtaaatgcctgtgccgagaatcagggcaatcatcggcacaccccatacgattccgttgagaaacgcgttcccctgcgttaccgcttctataatctgctccatcattttcctcgtcaccgctttcaacttttgtgcaaaacacgttcattctatcaatatatatgcgcccgcgtcaagacaatacggattttgaaggaaaaatgtccatgcaaacctttacgcacgctgtttttgtttgcaatgaaaccgcttttcacttatgatagaataaataaaaaaacgaggtcaacctaaatgcttcaggaaatttcattcgaagaaagaaggatacatatctgggacgagccgtccgctctgccgctttccctgctatttttacaggaaaacgcgccttatttcccaaaggcggaacgtccgtctgcatggtataaggagctcgttttaaaaaacgtgcttttacagcatgaaatcgcacatctttatttttatcaaaagcaatatggcctgtccatgacgtcggtttttcctctggcggaagcgttttcacagccggaggacatggaggacggccttgcgctgttccagaagtgcttttttgtctccggaacgccctatggaaaatacgcggtacaggtacaagggctttccgcaatgggaacgcgcatgtttgaagaaattctgtcaaaggacgatttttacagtgcgctctatacaaaacccgccgtagaagatataagggaaaccaaatgctttcttgttgccccttctttaaacggcgccgccgcttccaggcagtgggaagaaacgcttgaccgcctgtttgataatcgatatttcaaaaaatgcggaacaatcaatgtctcggccctgaaaacaggggaattggaacgggagcttgccccgtatctctgcgcggcctttgatgccgtctacctggctgcctacgatatagaggatggggccggtaaaaaaattcatgtaaaatatcttaattggttttaaaaggccggacgggaatcccgtccggcctgtatttcttctgattattcaccgatgattttaatcagcgcgtgctttttccgcatcccatcgaattcaaagtaaaaaatctgctcccaggtgccaaagtcgagctttccattcgtaatggcacagacaacctcgcgacccatgacggtgcgctttaaatgcgcgtcggcgttgtcctcaaacccgttatgatggtactggctgtacggcttttccggcgcgagcttttcaagccatgcttcatagtcccggtgcaggccgctctcgtcgtcgttgataaagacgcttgccgtgatgttcatggcgtttacaagcaccaggccctccttcacaccgctttccatgatggccttctgtacgtcgccggtgatgttcacaagcccgcggcgcgacgggatttgaaaaaataattcttttctgtaggatttcatgtaaaaggctccttttttgcccgacggctcctttggggtctgcacaacgcagcgtaccgccggataaccggatttttattaatctataacgggggaaatcacgggattgccgctgcggtcaagcaggacggtcaatccgccggaatagccgtcctcatggtataaataattgacgccggtttccctgtccacccatatttccgtctgggtaagcgttccctgcctgtacacccgttcaaaacggtcagatttcgccattctatccattcctccattatattgttttcctgaattgtttaaaggcttttttctaataagctatgggctttcgctttttccggcctgacaagccggtatgcgagaaagcacagaaaaagcaaatacgcgaccgctgcccaggaataaggtattccctcctgctgaaaaaggaatctctggtaggaaaggacggacagcagctgtgttgcgattacagtccagaaataccgtttattacggaaaaacagcagcagggcaaaaatgtcggccgggaatgtatacctgtcgtgcatatacggcagaaagtacggtaccagcagcaggacaaacagcgccagcagcaaatacctgtccgcattccagtttatcgaccgattgcagtaaagataatatgccatcaccgccagaagcgcgaccgtaaaaataaccgctgccgttcccatttgtccgatgaaacggtccccggtaatctggtagatgttcggaaaatccatcgacaggttcgcactgtaggcagaggtttgcctgaggtacacggaaagtacatcctcaaggcttcttccgaaaagcagcgccggtaccacgcttaccagatacacacccggaaccagcaggaatgtccaaagcttcatttttttatggagccaaagcacaagcagaaccggcagaaaaaacacggcctgaagcttaagcgcgaaggcaatcccataaaatatcataccgcctgccggcttccctttcataatccaaagaaacgacagtaccataaaaaacgtaaatattatatcacattgcccccatagcgcgccgtttatcagcacagagggcaggaaaagaactactccatacgcaagcagccccttcggtatggagcctgtccttttgcctgcataatacagaaagaaaaacgctgctataaagtcaaatacaagcgtaatcagtttaactgcctcaagcttaccaattggcagatactgcgccaatgtgaaaaaatacatgtaaagcggcgtataattgccaatactcttacccagcgacatcagcggcccgcccggattactctcaatctggcgcgcccacggttccagataatatgtataatcgggagaaaccgccccgattaacgcgtatctcaccagcaccgcaagcagggtgattcccagaaaggcaataatatccgcaagcctgactgagaagcctttccacagcgtaatccgctgctctaaaatccgtcggttatcgtgtacttcatttttcttttccactgcttttcctccgtcttccccctattagtcctcaaaaattcccgccgttaaagccccagtgcgtaacctcctcgtactttacatacgtccggtcgccgggaatgcccagcacctcgctgaagattttgcaaagctcggcagtcatcttttcaaaatactcccttgtggatgtgccaagaattttcacctcagcaaacgccgcaggcgcgctgttgtcgccgctaagccataaatggcagtccgcttctatttccaccataagccatgcttctgtttttccgggaaaaatggtaatcgcctggccgagccgttccttcagcgttatctcctgcttctgcgttacaggcgtgcttactttcaattgtatacagggcatagttttatcctccaatatattattttttcttacagtttatttttaccgcaatcccctgtacaagtcaagcctcttttcaatttttgatttttttatgttcccccctttttatttcgcacataatcatgtataataaacttcgtaaacgctgttttcgcgtttgcgccaaacatttggtacacgcgcagcaggaaatttaaaattttggagtgatttaaatgccactggtaaacgcaaaagaaatgctcacgaaggcaaaggccggccattacgccgtcggccaattcaacatcaacaacctcgaatggaccaaagcgattctcctgacagctcaggagctcggctcacctgtcatcctcggcgtatctgagggcgcgggaaaatatatgtgcggctacaagacggtcgtcaatatggtcaacggcatgctcgacgagcttaatattacggttccggtcgcgcttcacctcgaccacggcagctatgaaggcgcgctcaagtgcatagaagcgggcttcagctccatcatgttcgacggttcccattacccgattgaggaaaacattgaaaagacaaaagagcttgtaaaaatctgcaatgacaaaggcctttcaatcgaggctgaggttggctccatcggcggcgaggaagacggcgtcgtcggtatgggcgagtgcgctgacccccaggagtgcaaaatgattgctgatttgggcgttacgatgctcgcagccggtattggcaacatccacggcaaatacccggaaaattgggctggcctgagcttcgatacgctcgacgccgtccagcagctgaccggttccatgccgctcgttctccacggaggcaccggcatcccggaggatatgattaagaaggcaatttccctgggcgtttctaaaatcaacgtcaatacggagtgccagctttccttcgccgcggcgacgagaaagtatatcgaggacggcaaggatttacagggtaagggcttcgacccgagaaagcttctcgctcccggctttgaggcaatcaaggcgacggtcaaagagaagatggaactgttcggctctgtaaataaggcctgatttttgatgaagacagacggcgggacgcatatgtcccgccgttttttcttatattggctatagaaaggagcgcggcattatggagcaatatggacaaaagcaacagttcatctgcgcgaaatgcggatgcacggaatttgaaagcggccagttccaggcgaccggcggcaactttgcgaagcttttcgatgtgcagaacaaaaaattcatcactgtttcctgcaagcggtgcggctttactgagctttaccgggcggaaaccgacgccggctggaatgtgcttgatttcttgtttggcgggtaagtactttttacagcatacagcttcctggatttttatgaaaccttatatgatgataatcaaagaggggggaatcctttcgatgggttcccttacggcccgcgggcggcaaagcatcctgccgccctcttatccaccatacctatttatgccaagcggagtacacaaaaccgctgtgcgccgcgcacaggtattccaggtacttactttataccgcacagcagcggcagagtaaaagcagaatatgccctcattcaggcataagcaaaatatactgaagtttaggcagacaaatttcaaaacagcgcctggctatgacaattttgcgtcaaaaggagaaaatcgcctttttttccactgaattattatggaaatggacgctttttatttgagaaaaggttgcattttttttgaaatttgtgtaaaatgtatatgtcaattgtattgtatggggaattaggcagtttgattgccgtaagccagagcgtttcccccgcttatttttcaaagaattgagggattgtgtcatgtcaaacagattgtttcagggtgttattcatcaaatgagggacgccatagacagaacaatcggagtaatcgatgagacctccgttgtcattgcctgcagcgagctcggtagaatcggagaggtcattgaaagcgtgacggcggaaacactcggctctaccgcgccgtttgtcattaacggccatacgtttaaatcgttcggaagcagctccagggcggaatacgccgtgtttgtttcgggcaacgatgaaattgcgcagaaatacgtgcagctgcttgccgtttcccttggcagcatcaagcagtattacgacgaaaaatacgacaggggcaattttatcaaaaacgtcatccttgataacatcctccccggcgatatttatttaaaggcgcgtgagctgcgctttaattcagaggtcacaagggtctgcatgctgataaagattacgtcgaaaaccgatatatcggcgtatgatatcctgcagaacctgttccccgataaatcaaaggatttcgtcatcaatatcaacgagacggacatcgcgctcgtaaaggaaattaaagcgggcatcgattcaaaggatttggaaaagcttgcgggctctattgtggacacgctgtcgagtgagttctacacgcactgcgtcgtcggcatcggcaccacggtaacgggcatcaaggatttggcgcattcctttaaggaggcacaggtcgccctggaggtcggcaaggtattcgacacggagcgcaccattgtgagctacgataatctcggcattgcgcgcctggtttaccagctgcccacaacgctctgcgaaatgttcctgaaagaggttttcaagcgcggctccatcgagtcgctcgaccaggaaacgctctttaccatccagcgcttctttgaaaacaacctgaacgtttccgaaacatccaggaagctgtttgtacaccgcaacacgctcgtgtacaggctggaaaaaatcaaaaagctgacaggcctcgatttaagggaatttgaagacgcgattgtctttaaggttgctttgatggtcaagaaatacctgaccgcaaatcctgtaaaatactaaattatattttatttaagtgaaaatacgctaactttcattattttattctatttttatcagaaaaaggcgcccgcaatagggcgcctttttctgtgtatttactatcgtttttcgcctatttaatcacctgccgccgtcctccggtttcgtattccgccgtttatgccgtctcacaagcaaaacggcgatgcataccgcaaaaacggcaagcacggcggttaccgccgaagcaatggcaatctgcgtccagttatggctttctccctgcgcatccgtgcccgtactcagcgtactgctgcccggctgtacggccttctcttccagcaattctgccgccagccggtcaagatggaattttgtatccccggcatttacaaccgttatcttgtttttgcctttttgaagctccagccgcactgtggcctcgtcccagttattccaggccatcacgcccatcggtttgaggcctattgtcttctcctgcccgtttacagataccctcgcctgcgcgtccttgctcttgtagccgtttgcgtagcgcaggcgcagctcgtatattccggtttggccaacatcaatcgtaaaatcgacggaagcatccttgtccggcagctccacatacgcatcataatacgcaagctcatacttgtcgccaacctctgccgacttatgcagcacggcgtcctcagcctcctgcgtataaatgtttttgataggaaaagcccgcgattctaccccaatatcgatataatcaaggtcgagcgcgccttccctgacagcgagctctattatattatccccgcctctaaggaacagggtgtcctgcccgcctccgagctgccagcgttccccctcgtcgagctcttttgcactgcgcactgttttcccgttgagcgcaatatcgattattgccccctccggcgcggcatagcccatggaaaacgcatattcacccgcgttttttacgtttacgcagaacagcgccctatcgccctgttccatctgcgcgcagccaaagccggtaatctgcgcgtcataatcaatggaggctccaaacagggaggccgcctccgcttcaaagcgcatcgtaccgtcctgcggcgtgattttcagcagcacacaatcgtagggggcaagctctgtttcaaagaggttacccgattgcttcaaatcctcgtgcttccataaatcgcggacagaaacagccccggtcagtcccaggtcctggtaaaggtcgattttctgtgttttcttttcacccgtgcggttaaacaatccgacggcaaagctgccgtccggaagctgcccagcccagcgctcgcttgagccaagcgcaagcggcttgccggcaaaccccgccttattgagagctaaaacctcttcgttctggtaataggtgtaattgctgatacccgtttcgttgcggttgtcgattgtatcgtactggtcggcgatagcaatcggcgcgcccgccattgcaagcagggaaacggccgaacgcttctgcgcgtctatctcttccctgcccaaatccttggtttccacaaatttattcaggcgcaggaaatccccgtccagaatcatctgcccgcgtccgcttatgtcagaccacgccgtaaagccgtcgaaggaatttgcccattgagaccagtactcctggtgctgcccgcgcttcctgtcgctgatatggtcccagcccccgttaaacacatcttcgttgatgcgcatcatatccccgtactggagttcattttccgcgtggttatagaggtttggcatcacaaggctcagcatcacgccgtactcctcgcacgcctcatgcatccatttaagcgcctttttataacgctgcgtgccgtacgccttactcccgttatagttatccgggtcgccgctctcgcccgactcataccagccgagaaaatcgacgcgcaaaaattttacgcccgcgccggcaaaaaatttcacataattttttacatattgctccgcacccggcttatccgtatcgagccagtaaagcgcaacgtcttcgccgctgtgcttaatggccgaaggcagctcctcattgcccttaaagcggctgaaaaatgcgtaatcgggatttacaagccccgaaaccggcagcccgtccgtcccttctatggtacagccgtttttcgggccggccgcccgcgcggtaatccacagcggattataatacacgccgagcgccatacctttttcgtccagctgccgcgccatgtccgcccatgttttcgtccagttataattatatttcgttacatagccgtgttcgtttacctcctgcgccgcttcaatccagccgtcggttgacatcatggaatagccatactccagaaaattttcctctacccactctacatttttgtcccaccgttcctctgaaagcggtgcgtcgtccgtataacactgctcgtatcccatccagtaaagcgggcctgtgctcttttgtgcctgcgcgtagctttccggctcctcacgcgtaagctccaccgtatgaaccgttcccgagataaggcccgctatgacgcacgctgcaagcaagcagggcaaaagcttctttttcatcgttttttcctcccctggtattcggtatccgcccatttttaaacggctggataacgccgctgttatgcctgtgccggttcaaacaatccgggatgcatcctgctgtaatggaaaatgtactgctgcgcaatccccgcgtattcgccgaaatcctccggcgccaaatccgggaacaggcgcgccatcgcgcgtttcatccaaacgtcgagcggaaagcactcaaggcggtgcatcccgtataaaagggcgcactgcgcgacctttggcccaacgcccttgattttcatcagctcttcacttgctttcccggtttccatttttcgtatcctgcccaggtcgacttccccgcacgccactttccgcgccgcgtcgagcaaataccccgcccggaacccgcagcggattggcgcgaggtcgtccggcgtaagctttgcaagcgtttcaggcagggggaagccgtaaacgccgtccctctgctccccaaagccctcgcacagcctcgcgacgatgcccttgatgcgtttgatattgttgttctgggaaataataaacgagcaaagcgcctcccatgaatcctggtttaaaatatgcatacccggggcaaatgccgccgcttcccttaaaacgggatgaagctgtgaaagcgcgtcctttaccgccacataatcaaagcgcaggtcaaaataatctgtccagaccgcctttgcgtcctttaccgtcgcgccgtcgagatagagcgtatcgttttccattcttgccgttaccgttttgccaaaggctgtgccataaaaggagccgtcgggacgctcgtcccagcggaagctctgcccgcagtcgagcgtctgttttaaattaaggtccgtgaccgggaacaccgccgcacccgtgtctgttttactatactgcaaaaaaataccgccttctgcgttgtgctcaaatatgatttcattgtatcataacccggcaaaatatgctacaatagccctgttaactttttcttcctgaaaggatgagtaatttatgcgcgagacaatctgcaccatcccaatcaacgacgtgttcggcccgaaggagggctgccccatctgccgcctgcgtgatatgcttgaacacaactatgtggaatatattaccggcgccgcgatgatggaaccggacgtccgggtggaaaccaaccaaaagggcttttgccggaaccactttgaaatgatggtgcagagcggcaagcgcctgcaaaacgcattgctgctccaaacgcatttggaacagatagctaaagattacctgcctgaagccccaaagggaaagcctgataaaaagcagctttcagcactctctgcgcttcaaagcacctgctttgtctgcgacaaaatcgactggggaatggcgcatatgtttgaaacagttttccgcagctttgaaaacgacgaatccttccgcgcgctctttacacagcaggaatatatctgcctgccgcattacacacagcttatgcaggccgcaatgggcaaaaacggggtctcttcaaaaaagctgccggaattttacagggcggcggcatcgcttgcgggcggatatctcaaaacgcttggcggcgacatatcccatttctgtacgatgtacgattaccgcagccgcggcggcgattggaaaaactcaaaggacgcgatagaacgcgccgtcacctttttgacgggaagaaaaatggaatccagcgattcctgatattttaacggctataccgcttccccagcaatttctctttgcaaaaaggccgcggctgtaaaaccgcggcatgaaagattaaaaatgaatgtatgaggtgcagctatgtgcaaggacgccccgcttgaaattgagcgtaaatacctaatccgttaccccgatattcccgttttagagcaggccgaaggctatagcaagacggatatagagcagacatatctaaaaaatgacggttccccgttcggcgggcgcgtgcgcaagcgcggcgcggatggaaaatatacgtacaccaaaacttacaagcgcaccattacggcggtaaagcgcgtcgaaatcgaggaggagattacgcgggaagagtacgattccctgctaaaaaaggcagacccgacgagccggacggtaaaaaaacagcgccactgctttatttatgaaggcctgctgttcgagcttgatatttatcccttctggaacgaccgcgccatcctggaggtagagcttgaaagcgaggacgcactgttttttatgccgccgtttatcgaggtgataaaagaggtcacgcaggatttgcgctaccgcaacagaagtatcgcaaggctggttccttctgaccatatctaagcggcagccgcctttctgttcaattctatatggcggcggtctgttttaacaagcccgtcatccttcagctttttgagctcccgcatcatcgcgctgcggtcgacgcacagatattcagcgagcgacgcaaatgaaaacggcaggtcgaaccgttcgtctccggcgcgcgcgcacagcagggtaaaataagcaatcagcttttcgcggattgtccggcagctcaaaatctcgatatgctcacgcagcccctccgcgcgcgcggcgacgagcgtaagcatgttctgcaccaacacgctgtgataaatacaggcgctgccgcagcgctttgtaatatggtaatagtcgataaacataatttcacagtcctggtcgcagaggacagtgatttcatttttccagaggcagccctcgtaaaagatatctccgaatatttcgttcggcccggcatgctcaataatcgtgcgcacgccgtttacgtcggtacgcacgacgctgacgcttcccttgcggataatgccgaccgccttgccgcggctgccaaaggaataaacgtcgtccccgctctgaaaaattttaacggagggatggaagcagcgcatcatttcctcgtaatcgtccttcgatatcccttcaaacagcttacaatcaaaatagcccatgtttattcccccgtttccttacaattcactttgataagtacagtatattctttttttcgcatttctatagttgcaattgcaactatagataggataatacaatttttctgttttgtaaagtgatgaaaccgtattttgttgaaaaggagggcggaaaacatattctgaaaaggcgagacaaaatataattgatttacaggaggaaagcaagttgaacaaaggcggtatattttacggaataagtgtcataattggtgtagcgggagtattggccggtgtgcttttgggattgtctgaaaccaatttttttgttactctgcaaacctggactatagcggctatattaacgctggtttttatttttttcgcgaacgtcctggacagcttggacaagatttcaaaccaaatatccggtttaaaggaagaaaaatcaccggcgcctgcaacagccgacgtaccgggctcttcttcagccgcgcctgattcccaggagtacgggcaagcaaaccagcctctaacgggaacaaacgaatggacctgccccagttgcggcaaagtcaaccaaaacgatgcgggaagctgcgtttgcggtaaacaaaaaccttaatgttaatgctaaaatacaaattaagcgaatacataaaagctttttcacggaatttcagccgttttataaggacagcaatttaagacgcgccgcccgcataaatccggcggcgcgtcgtttttctttcgtctgatagaaattgcaggaatcggcatcgctacctgtcgccggccgcggggccggtgatgtgcagaatgccgtcgtaaactaaattgattaaatccacaagatttttccaccgggtttcgtccgcgctgatataataaaaattcatcgttccctccttgcgcatatttactatgcccgcttccttcaaaatctgcatatggtgggacaccgacggcctcgtcatatgcgtcttctgcgctatttcccctacacggatgccggccaaatcgctttggagcagcgcgaacagtatcagctgcctggtttcgtcacctatcgcagttaaggcgttcctgcagctgtgaaacccctctataattttttctaaccgttcttcacattccttttccacaaaatcaacccctataaatatttcacattgattttttcacgctgggctgaacgcagaaacctgaccttcggatacccaagtaccaaagcagttacgactgtctgccctctggagagcccaagctctttttttatttttctcgaaaatttggcggcggcggcaaaataaccgctgtacagcacgcccagcccgttcgcttcagcggcaaattccatgttctgtgccgcaagcgcgccgtttatggtgttttttgcaatgacaacgactacggcaggcgcatggaaaaagaaaaaattgtcatcgatttggttccttctcgccaaagggctgaacaaacccgcaaaaggctttacttttctgaacaggcggacggccatctgttctatccttgctttttccttctctaaaacagcaaaggaaacgtcctgcatattttttgccgtgtgcgtcagcctgccagcctcaagaacctgttccaatacattatggggaatttttttgtcctgaaactgacgcacgctgcgccgaaaacggattacatccaatacgctgtcgggattgaggcgaatatcgccggttttggcgattggccctgttccataaccgctgatggcaaccgcttcctttgggcatacggctacgcaatgcccgcacatgatacaatcgtttgacataacacaagctttcccatttttaagcccgatattgtttgcagcgcaatcctttacgcatatgccgcagccaatacatttattttcattaatttttatgacatgtcccgtcataatcgcagcccctttcgttcactttctttcaccattataacaaacagcgtaaaaaatgcgatattggtaaagaaattcgttaccattgaaaggctttcttctttctggctcaaaatcgcggaataaaacgctaaaacggcatagccaaaggctatgccgtttaattacagagtatatgggcggcgcaggccgcacgcttctgtctagtattcgtggttcctttcgttttcttccagctgctgccgcgtgagcactttgtcctgatgctgctcaaccgcgagcaaaaccagcaggataaagagcagcacaacggaaatgccgcccgtaatatatgcccagagcctgtttccggtaaaataaagcacaaccgccgccgcaaagagtactgtaataattttactcataacactgcctggtcccagcatgttgagcttatgtttttgttttttttcttccatacgttctgccctcccgccaaatttacagctcttttaaaaacggttcaaaacaaatgccttcctgtgggggaacgcccagttcgtcggaatagcgggaagcgcgcgcgatgaaccggcccgcacggatgacggattccctgaattcaagcccatttaccatgtcggcagcgacaatagaggaaaatacatcgcccgttccggcgcgttccccccctaccttgagcccgctgaccgtgcagaggctttcgcccgcccctccgttttgctcgtataaaaagttcgtaagctcctgtccgcgggaaatccccgtgataaccaccttttttgcacccatcttacaaagctcacgcgccatgcgcgcaagctcacgcctctcccacggcgtgccgcggtacggggtgccggtcaggatgcacgcttccgtcaaatttggcgtgacaatgtccgcaaggctgacaagcgatttcatttccaagcacatatcgtcggtataggtggtatagagcctgccatggtcgcccataacagggtctacgattacctttgtctgagccgtcttaaaagctttgataaaacgcataacgatatctatctggcgttttgagccgaggaagcccgtgtatatgccgtcaaattcaagctgaagcttccgccatttttcaataaacggctccattttctcggtgtaatcgtcgaaaaaatagtccggatagcccgtatggttggaaaaaacggcggtcggcagagcacagcactcaatacccgccgccgaaacgacaggcagggacacagcaagcgaacaccttccgaatccggaaaaatcgtttacgaccgccatcctcttttgcctggactctgccataccgccatcctctttcttttgctgccggtgaagcgtcaaatctcaataaacgcgcagccaagcgcgggaataataagcctgccgttttgcaggctcgtacccatcaaaagctttccgtgggaatatcccggcgggatatcgatggccacgtcctgaaagcttgcgttaaatgcgcagaacagcgcgccgtcgctgtcgtggcgcacataggagatatgcctgccgctggtaaacgcgttgatgatgtcgcccttcttgagcgcggagcattccttcctgagctttccaagcgccttaaaccaatcgagcagctccttgttttcccgtccccacgggtagcacgcgcggttgaacgggtctcggtagccctgcatgcccgcctcatccccgtaatagatacaggggaagcctggcagcgtataaagcataccggccgcaaccttcatcagcttgataccgcgctcgtactgctggtcggtaagcttcgtattcgcctgccagttacggtccctgccgtttaagggctcgcccgcaagtacggtcagcgcgcgttcggtgtcgtgcgtgccgagcaggttcatcaaaacgtttaaaaccggcttggggtaattctccaccacgcacataatacgctccattacatccctgccgtcggcgccgcgcaggaaatcaaggattgccgcgcgaaatgggtagttcattacgctgtcgagctggttgccgagcagaaacgccctcctgtgcccgtagctttctttgttggaagcatcctcccagacctcaccgacgacgaggccttccgggttttcctccttgacggcctttctcaggttttccaggaattcgtcgggaagctcgtcggctacgtcgagcctccagccgctgttcccggccttcatccatttgcgtacgatgccgtctttcccgttaatgtattcgttgaatttcgggtctgtttcgttaacctccggcagggtatagaagccccaccaggaattatactggtcaggccactggctgaagtggtaccagctggaatacggggattcctgcgaattgtaggcgcccacgctctggtaacggcctttccggttaaagtaaacgctgtcgcagcccgtatggctgaacaccccgtcatttattacgtgcatcccgcgttttttcgcttcagcacagagtgttttaaagtcctcctctgtgccgagcagcgggtcaattttactgtagtccgccgtgtcgtagcggtggtttgaatatgcctcagacaccgggtttaaatagatgcaggtcactccgagctcctctaaatagtcgagcttctgcgtaatcccttcaaggtcgcccatgaaaaagtctgagttcgtaatttccccctgggcgtttggctgccagaccggcgtttcgtaccagtcctcatggagcgtcctgtcctgcgggatattttccttgcggctgcctgaaaaatggaaccggtcgggaaaaatttggtacattaccccgccgagcggccatttcggcgtctcaaagcccttttggtagcaggttatctgccacgcagcacccggtgagcggcagatttcgctcttcttctccggccccgcgggtacgataaagcgcatgccctcgtttgtatgcaggcggaagccgtgccagtaaaggccaatcttttccggcgtgtagtggcattcccaggtttcaaacccgtcgccgcaggtgccgcaccagaacatattgcagcgcgtccagtcgccgtcgaaatcgtgcttgatgcttaggtccgcgttcacgcagttaagcgaacgcggtacaagaattttaaaatgaatctgcgtcccctcttccacagcacccatcgggctgcggtaaaagctgtttctcgaatcgtatggaacgttcataatcccatccctttcgctgaaataaaccttcccctatattatgccgccgggagagctctcgcctctctgccgtctttttactctaccggatttaaatgccagatgctgtccgcatattcgcggattgccctgtccgccgcgaaaataccggatttcgcgatattgacaagcgacatcctgttccaatgctgtgtgttcaaatacgcctgcgaagcctcctgctgtgcctttgagtagtccgcaaagtcagcaagcaccatatatgggtcgcttccagtcagggaatttgcaattgaggtaaagcgggccgtattgatttcatcaacggctttccggataatatggttgttctggtaatacacctgcggatggtagccctgcttcttaatcgtctcgacctccggcgtcgtcatgccaaacaggaacatgttctccctgccgaccgcatcgtggatttccacgtttgccccgtcgagcgtgccgagcgtcaaagcgccgttaatcataaacttcatattgctggttccgctggcctctgtgccggcaagcgaaatctgctcgcttatctccgccgcgggaatcagcttctccgcgaccgtcacgcggtaatcctccagatatacgacctttagttttttgttcaccgccgggtcgctgttgattttgtccgagagcgccacaataaactggataatctgtttcgcaaaatagtagccgggcgccgcctttgcgccaaaaatataagtcttgggtacaaactcggcgttcgggttctcgcgcagccactggtaagtcgtcaggatatgaagcgcgttcatcagctgccttttatattcgtgcaggcgcttgacctgcacgtcgaaaatagaatccgggtcaaccgtaatcccattgtgctccttgatatatttcgccatcctgagcttgttctggcgcttgaccgcggcaagtctttgaagcaccgcctggtcgtcctggaaatccatgagccttgaaagctgtgacgcgtcgttcacatagccgtcgccgataagctccgtaatcagtgccgacagccccgggttcgactggttgagccagcgcctgtgcgcgatgccgttggtgacgtttgtaaacttctgcggcattaccgtataaaaatcgtggaatacggtatcctttaaaatctcgctgtgcagggcggacacgccgttaaccgaaaagcttgccattacggccaggttcgccatacggacgatgccgtcgttcaatattgccatcctgccgacctggtagccatctacgcccatctggtgcagctgcgcgcagaaacgcctgttgagctcttctattatctggtaaatgcgcggcagcttctggcggaacatgtcttcgctccagcattcgagcgcctcgcgcatgacggtatggttggtgtacgcgaccgtacgcgttacgatatcccacgccttatcccagtcatagccgcactcgtcgagcataatgcgcatgatttcagggatagcgagtaccggatgtgtgtcatttaaatggatggaaacaagctccggcaggttgtcgagcgagcggttatggcgcaggtggcgtttgataatgtcctgaatcgtcgccgaaacgaggaaatactgctggtttagccgcaggctcttgccctctgtgtggttgtcgcccggatagagcacctttgtaatggtctccgccatggcgttgcgctccatcgcgcggatatattcgccgtcgttaaagagctgcatatcgaacgccttcgactccgccgcccataggcgcaggcggctgacgcccctgccatccttgcccgcgacgagcatatcgtacgggacagcctgcacggtgtccgcgtctttaatttcaacgctgtggtagccgtcgcgccagctttcctgaacgcggccgttaaaggaaacctcaattgccttttccggatgtccctgaagccaaacgcttcctcccggcagccagaaatcgggcagctcggtctgccagccgtcaatcagcttttggctgaagataccgtactcatagcggagggaatagcccatcgatgggtacgcctgcgacgcaagcccgtccaaaaagcaggcggcaagccttcccaggccgccgttgccgagtcccgcgtcaggctcctgctcgtaaatattctcaagctttacgccaagatttgaaagcgcctttgacacagcgctctccatgttcaggttatataggctgtttttgagggaacgccccattaaaaattccatacataggtaataaaccgttttcttgccctgctgtacctgcctgtcatgaaaatcagaatagcccttgctcatcaggtcgcgcacgacaagcgccgtcgccttgtaaaaatgttcgtctgtcgcctcggccggcgttaccccaaaattgtgggagagcttctgttcaataagctcctgcgcctgctgcgccgtcagattgtaatcagtcataaatacttcttcctcctggatattaaaagtaaattgtatccctttttcatgcgattgaaattctacccgaaaaaaccgcatagtattttatattatactacccgcgggctcccatttcaacaggaacttgcctttttctaacggagaagcgagaatccggtttggaaaaacgccttctattaaggtacctgaaaagcggaaaaattatgttacgctccaaaaatttgtgcaaatccctttaaactttgccgcggatatattataataaccgtgaatacacatgaaaccgtacagccttgcgcgccgtggtttcaaccttcggcgcacatcaaacgaaaaagggtgagctttatgggtggcaaaaataaaataaaatgcaaaatcaacaatacggagttcgtcatcagcgcggatgaggacagggaatatatcgcgcatatctgcacgattgtggacgagcgcatcgccgcgcttgaaaaagagcatcataacctgtcgaattccatggcgacagtgctcgcggcgcttaattactgcgacgagctcgaaaaggaaaagaaggtcacggcggagcttttaaaacacaatgaggaatgcgcggcagctgaacagaaggcaaaggaaagccttgagagctttgcggtggaaaacgagcagctcaaggaagaaaaacagggcctgcacgcgcggattgaggagctcaaagctgaacttgcggccgcccaaagcaccgcccgccccgcacagcagaaacccctgcagcagccggggcagcgccagcagcagcggcaggcacgccccggcgacagccgccagaggaaccagaacggctactgccagcccggcgcgcagcggggcgccgccccgctgcaaagacagccgcagcaaccactgccgaaaatcaattaccaggataacgacaaaatcagcgatgagtaccgccgcgaggattttcaggacccggcgacggaggacgaaatgctgagcttttttgataacagatgaataagagcctgaacccggaaattttagcgcccgcaggctcaatggagtcgcttaccgccgctgtccgctgcggcgcagacgcggtatatatcggcgcaaagcggtacagcgcgcgggcgtccgctcagaactttgacaagcaggagctcgaaaaggctgtttattactgccacgcgcgcggagtaaaggtataccttgcactcaacacgctcttgacggacgacgaaatggacgacgccgcagaaactgtgaaagaggcctgttccctgccggtcgacgcggtcatcgtgcaggatataggccttgcctcttttatacgcagcgcatgcccctcccttcggctgcatggctctacgcagatgtccatccatacgccacagggcgcaaaggaactttaccggcaaggcttttcccgcgtggtgctcgcaagggagctttcaaaggaagagattgcggaaattgcggaaagctgcccgatagagctggaggtatttgtacacggcgcgctttgcatgagcgtttcgggccagtgctacttcagctctctgctcggcgggcgcagcggcaaccgcggacagtgcgcccagccttgccgcctgccgttttccgtacagggcgggacagggcatgacctgagcctgaaggatttgtcactgctccatcatttgggcgagctgcgcggcctgggcgtccatagctttaaaatagaagggcgcatgaagcgccctgaatacgttgcggcctccgtcgcggcggcgaaaaaggctgtaagcctcggtttcctgccgtatgaggattcgaagcttttagagcaggttttttcacgttccgggtttaccgacggatattacggggaacagcttggccggaagatgttcggcacgcggacgaaagaggacgttgccggcgcgcagccggccttgctttcacaaatcagggcgcagtataaggacgaaaagcagcggatacccgtaagctttgcgctccaaataaaagaggggcgccccgcaaggcttaccgcccgtgatttggagtcgcatgaggcctgtgcagaaggagcgcttccgcaggctgctttaaacgcgccgctcgacgcgtcgaagtgcgttgtccagcttgaaaaaacaggcgggacgccctttgtatgccgcgacgtacgttgtgatatcgacgagggcctgtcgcttccgctgtcccaaatcaacggaatgcggcgggaggctttaaaaaagctggagcagtcgcgcgcactgcgcagcgcgctccattttaaggatacaaaggccgccgtacccgaacacagcgccgggcaaagggggcttgccgtacgcgcccgttttgccgactccgatattcccgcctgctttaagcggtgcgagcttgtctatgttccgctttatacggccgcagacaggctttcttccctgttggaggagggctttcccctggcggttgaaattccgcgcggcatgttcgggcgggaacagcaaatcatatcgtatcttaaagcggcaaaggagcgcggcattacgcacacgcttgcgcagaatatcggggcaatccccctggcaaaggagctcgggtttgccgtacacggcggctttgggctgaacataatgaacagcctgtcggctgaacagatgcgcctttgtgggctaagcgacgtggaaacgtcttttgagctgacagaaaagaaaacaaatgcgctggcaggagaaatcccgcgcggttttctggcctatgggcgtctgcctctgatgcttacaaggaattgtcctgtaaaaaacgggaaggctgattgctcctcctgtaaacacagccagcaccttaccgacaggaagcgcgaaaaatttccaatgcagtgcgattataattgtacggaggttctaaactgcgtaccgctctgtgttttcgacaaaataaccggcttttcacgcgccgacttctgcgtactgcgcttttctgtggaaaaccgtgtggaaaaagaggaaatattcaggaaatttgaggaaaaaaagtgcgtaacagagccatttacccgcggcctttattacaggggcgtgctgtaaggcggttaccttataaaggaaggatgattgaaacgatggaggaaacgattaaatttatgaaattgagggaaaacgcagtcatcccccaccgcgcgacgcccggcagcgcgggcatggatttgcatgcctgtatcggcgaaccaattaccattcatccgcaaaagctcgttatgattcccacagggctttccatgtccctgccgcacagcggctacggcgcgtttttgtttgcgcgcagcgggcttggcgtcaaacacggtatctgcctttcgaacggcgtcggcgtcgttgacagcgattaccgcggggaaatatgcgttggcctttgcaacgtaagcggcacgccttatacgattgagccgggcgaacgcgtcgcgcagctggttgtcctgcctgttgccatgcttggaagcgagcaggtgcaaacgctcggcgaaacacagcgcgggacgggcggtttcggctccacgggaagggtttaaaccgatgcatgccttttctacatatttgcatttcattgacgactagaaatgccagtcaaaaaattgtgtagtttgaccaaacacgccgaaatataataacttttagttcattattactatgaattctcacaaaaatttggctaaaaaatggattcaaaacactttgacgtatggacaatattatggtaatatatacattggacaggactttaaataaaaaagtcccactccataaacaaagaaaggtctttttatgggcaaggttttagtagtcacatcgggaaaaggaggcaccggaaaatccactgtcgcggtaagccttggcaacgcgctcgtaaaacgggggcataaggtattgctgattgactgcgactgcgggatgcgcggcctcgatattatgctgggcgtggcaaaaagcctggtgttcgacattgcagacgccgtctgcggcaactgcaagacagagcacattatctatccctgcccgtattcggagggtttgtttttgattcccgcgccgcaaagcgcaggcgacgagctgtccccccgcgtctttaccgattttgtaaagagccttgcgccacagtacgactatattatcatcgattccccggcgggagtgggcaagggctttgaaacggcggtcgcgccggctgagctttgcctggttgtcgcaaacgccgagcctacaagcgtgcgcggctgtgaaaacgtaaaaaaacgccttttagatttgggcaagaaggaaatgcggcttatcatcaaccgtttttcccgttccgcttttaaagaaatgaacgtatactacgaccttgacgaggtcatcgacggtaccggcatccagctgattgccgtcgtcacggaaaacaggcaggtggtttcagccatccagaagggaacctcctacagcggcaaatgcaccgcgcttgaggccgtgaacaacctggccgcgcgcattgacggggagaacccgccgcttgcggtctgctaatcaggacaaattgcttttcggaagcgtgaaataaacacaggagggtttctgcatgaatatagcattgatagcacacgacgagaaaaaagaattgatggttcagttctgcattgcgtactgcggcattttaagccggcacaacctgtgcgcaacaggtacgacgggaaagatggtttcggaggcgaccggccttgaaatcttaaaatatctgggtggttcccagggcggcgaccagcagattgccgcaaggattgcctgcaacgaggtcgatatgctcctgttcttccgcgacccgctgaatccaaagccgcacgagcccaacgacatcaacctgctgcgcttatgcgacatgcacaacattcctgtcgccaccaatatcgccacggcggaagttttgattcacggcctggagcgcggcgacctcgactggagaaacatcatcaagctgtaaatttatttttgcatgattgccacaagggagtaaagcgcctgctttactcccttgtttttttataaatctcttttttatgggagcattacccaaatgccgctgctgttttttatttggttaacgtttctgttgacaaaggccgcgccgtttgatactatataattaacttttaagttaaatgttaattgattgtgaggcggcgcgtattgggacttcagcaaacgctgcgggcattggccgacccgaccaggcgtgaaatattgaacctgctgaaaaaaggaaggctgtcggcaggggaaatcactgaaaatttcgacatgaccgccgccgccgtttcccggcatctgtccgtcctgaaggaggccggcctgatacgggataagcgcgagggaaaatttatattttatgaggttaacctgagcgtaatggaagagcttctcgcctggctcaaagaattgggggattacaatgaaaaaaattgataaagcggcttggctggtatccgcctgtatgcttgccgccgcggctgcggcgctgtttttccttcctgacgaactggcaatccaatggaacaattccgggataagcaacaccgggcccaaatggattgtgctcctgttccccgccctggcggcgctttgtattgtcctgcatgctaaccaaaccggcaaaaaagaaggagccggggatattccctggtattttgcaggtatcctggtcctgtttgccgccgaaattgtcatcatctgcaatgggcttgggctgatagaaataacaaacgccgacagccggcttgtgacaaggtgcgcggcaatcatcctcggctgcctgctggttttctttggtaaccggcttcctaaaacagcgcgcaactattatgtcggggtaaaagcgccatgggcgtttgaaaacgacgacgtctggacgaaaacgcagcgttttgccgcaaaggtttgggttattgccggactcctgctggttgccctgtcctttgccccgggctgtatacagtccgccgccgtgtttgccgcaatccttgccattgtgattttgccgagaatatacagcaagcgtgtttttgaagcggggcaaagcccgcgcggaaaataaacggcgcactggtaattaaacctgattggttaaaaaggcgctgccgcgctgagtgttggcggcgccttttttcatactatccagcttttttattgaccttcaagcggctttagggtgttaaatactgatgaaaggaggttctgccatgacaatcaaagaggtggaacagcttaccggtatgaaaaaggcaaacatccggtattatgaagacgcggggcttttaaagccggataggaacgaatcaaataactacagggattacacccaggaggacgtagagctgctcgggaaaattaaattcctgcgaacgctgggcatctcaatccaaagcatcaggcttttggaagagggcacggcttccctcccctgcctggcggagcaaagggaacaggaaatacacagccaggctgaacagcttgaagcgcttaaaaagatatgcgcacgtgtaaaggatggcggctacagctttcatactttggacgtctccgccgtaaccggaagggccgaggccctgcaaaacaggagcaggaacgtccttcggtccgacaggatttaccgtctggagcagcatgacaagctgctgacaaggcttctggaatatacaggctgcctctggattacgctttccgtattccttcgcgttctgtgcaggacagccattccgttatggcttacagtacctgccgtatgcatcgtgctgtgcgctgctgccgtcaaattatttcttgtaaaaagaatcatccgttacaggataaagaccaatcaataaactatgccatatttatttaacgccttctgtttcaagcgggaaaccgcttgcgccgtgccgaaaaaacatgtataattggaaagatagcaatttatttgcaatattttacgtaaagcagaggttcttcacaatggctttgattacgaaacgcgtatacggctcggaggatgtgctccccgccgacagctacaaatggcagtttattgaggatgtcatgcgcgaggaggcggcctcctacgggtataaggaaatccgcacgcccgtatttgagcacacggagctgttccagcgcggtgtgggcgatacgacggatgtggtgcagaaggaaatgtacacgttcgacaccaagggcggaacatccattacccttcgccccgaaggcaccgcgggcgcggcgcgcgcgctgcttgagcatgccgtttataacgacggcctgccggtcaaggcaagctactttgtctcttgctaccggtatgaaaaaaaacaggcgaaccgttacagggaattccaccagttcggccttgaaatctacggcaccgcccacccgtcggcggacgcggagctgataagcgccgcgcagtccctgtttgaccggctcggcgtaaccgatttgaccctggaaatcaattccattggctgcccagaatgccgcgcacagtaccataaagcgctgcgcgcttattttgagcagtacagggaccagctttgcgaaacgtgcctttcaaggctggagcgcaaccccatgcgcattctcgactgcaaaagccccgtgtgctctaaaatagcgcagggcgcgccgacggtgctcgactatatctgcgaagaatgcagggagcactttgcgggcgtaaaagggtatctcgacagcgcgggaatcgcctacaccgtcaacccgaaaatcgtaaggggcctcgattactacacaagaaccgtttttgaatttattacaagctcgctcggcgcgcagggcaccgtctgcggcggcggccgttacgacgggctgattgagcagctcggcgggcagcacctgccgtcgctcggctttgcgctcggcatggagcgcctgctcgcgctcatggaggcgcagcatatcgaaataccaaaaccagacacctgcgacctttacatcgcggggctgggagacaaggcgcagcgcaaggcgtttgagctcatcgcacaggtacgccgcgcgtccctggcggcggagggcgacatagtcgggcgaagcctgcgggcgcagatgaaatacgccgataaaatcggggcgaaattcagcattgtgctcggggacaatgaaatcgaaacgggcagggcgaacctgaaaaacatgcagacgggcgctgtcaccgagattgcgctcgacgaaaccttctttgaaaaattcttcgcggtttacctggaggacggcagaaacacgattatcaactctctccaggaaggacaagccgcctgcaaataaaggaaacgacaggggattttatattatggcagaatttatgacagggctcaaacggacaaactactgcggggagctgcgcgcccaagactgcggaaaaaccgttacggtctgcggctgggtacagcgccagcgcgatttaggtcagctcatttttatcgatttgcgcgacaggacgggcatcgtccagctttcctttgacgactcgacagataaaggggtttttgaaaaggcgtttgccgtaaggagcgaatatgtgcttgccgcggtgggaaccgtctgtgagcgcacctcaaaaaacaaggatatcccgacgggcgatatcgaaatcaaggtcacacagctccgcgttttgggcgaaagcgaaacaccgccgtttgagattgtagaaaacagcagcacaggggaaccgacgcgcctaacctaccgctacctcgacctgcgccgcccggatttgcagcgcaatatcctgctgcggcacaagattgcgaaaattacgcgcgactattttgacgaacagggctttattgagatagaaacgcccatgctcatgaaatcgacgcccgagggcgcaagggactaccttgtcccgtcaagggtacacaagggctcgttttacgccctgccccagtcgccccagatatacaagcagctttgcatggtggcgggctttgaccgctatatgcagattgcgcgctgcttccgcgacgaagacctgcgtgccgaccggcagccggagttcacgcagattgaccttgaaatgtcgttcgccgacatggaggacgtcctcgaaatcggcgaaggctacattaagcgcgtttttaaagaagcgctcggcgcggatattcccacgcccttcccacgctatacctacaaccaggtgatggagcgctacggctcggacaagccggacacacgtttcggcatggagctttacgacctgacctctattgtaaaggactgcggcttcggcgtatttaaaggcgcggcagacggaggcggcagcgtacgcggcattaccgcgaaaaacgctgtcaagacgtattccaggaaagaaattgacaagctgacagaatttgtccgcggtatcggcgcaaaggggcttgcatggatcaggatgaccgacgacggtattgcgtcaagctttgctaagttcatgtcggaggaagaaatgcaggctatcctgcaaaaagccggcgcgcaaaccggggacgtagtctttattatcgcggacacaaacaacagccatgtgctgtcggcgctcggcgcgctgcgctgtgaggtcgcaaaacggctcgacatcatcggcgagggctacaacttcctgtgggttgtggaattcccgttctttgaaaaggacgaggaaaccggcgaatgggtcgccatgcaccatcccttcacctccccgaccgacgagtgccttgataagctggaggcggataaaagcaaggtatacgccaaggcgtacgatatggttttaaacggtattgagctgtcctcaggctccatccgtattacaaatcccgagctgcaaaaccgcatgttccgtatgctgggcctgagcgaagaggaagcgcaccagaagttcggctttttgaccgacgcgttccagtacggcgcgccgccgcacggcggtatgggaatcgggcttgaccgcctggtcatgcagatgattggcgcgcagaccctgcgagacgttatcgcgttcccgaaggtacagaacgcaagcgagctgatgacaaacgccccttcccctgtcgacccgcagcagcttgaggatttgggaatccaggtagggcagtaacaaatcgatatacgtaaagaaccgctcaagctaaagcttgagcggttctttttacagcaaatttccgcttgcggattcattcaatttacagtagctgcctgccacaaacaaattggcggaaaaaattatgtaatcagcataatgggccgcggtttgcgctattccatatatggtaacgttccccgccgcatctgtaacgcttgcgcgcggtaaaggaagaaccgccgcacatgcgccgcaaatgatgatatccgctatcagcaaacgaagaaatcttttgctgcccgtaatcttatatgacaaaaaaacgatacaaaacaataccgctcctgtcagcagaaatccggcgttctcggatatctgctgtttgattgaaaaatcaagctctcccatcattaaaaaagtataaagctctgggagaaagcttcctgccagaattacgacaaaagccatggcccaaggaaagaacagccgtttggagccggcagcgtctattcctttatcgttgcgaaaaagcaaaacaataaaggccatgcccagtaacactgccgccttgagaaccattacgccgaaggccgtaaaaagacccgcttcctctgccgtactgaatatgtcagtcgttatggaaagctcaagcccgacggagccgataaacaaaactgccattgccgccgcggtccaaaagaacaaaaagctgctctttatcggttctcgttccatattgtccctaagcctgttcgttgtattcatttacctgtcccatcctctctttcttttccaatcctttacatatatattttactacaaaaaaattttttctcaagccaaagcacatattgcaaatcttcctttttctggccgaccgtaaaaaagcccctgccgaggcaggggcttttctattatgctgccctattattatgtagttccccgcgggacaaacccgaattcctcatgcagcttatagttttggatggtcaaaattccctgtgtccaggtgccgtatacggtaatatcagcagtcctgtggctgtcgatatacttcacatcacagcctgtctgttgaaaaataatcgcgttgaactgcggcgtaagcacgccgccctgtacggaacggacatttcttacaatattaggcgtccccggcaagcagttatatacgcagctgatataatacgtcccatcaattgtctttttcctgctgacatcatatcccgtggccagagccgagacagggctttcctcttcgccctgaatatttgcaagctcctgttcgaccgcctgctgccggactgcggcggcaagcgcctgttttttgaattcccccggcgttaccgtcggctgtacccctgccgtcagtgcaaactccaagccgtaatccctgttgatttcatccacaatttcctggtattgtgttaaatcaacagaagctgctgaaacgggaaggctgcatgcggcagtgagcagaaccaaggctaaaaacattgaacatacctttttcatttgtaattcctccttgtctttattaacagcctgtttccagtggaaaacaggcggaccgattacattataccggacatggcgtctgcaggtgtccctctgttttgtattaaacggcacaatttttcgccttcatctataatatcaaatcaataatttattataatacaattatatttacattctttgtataagtaaataggtaaaagagcttaaaattatttttatttttagtaacatctcataaatcccttgtgttttgtacctgcatccgatataataaaaaagcgtgggcaataccgccgcgctttttcctgaaacaaaaaatcaaccgggataaaggagctgaatggcatgggaatcattaaagcggctgccggcgctataggcggcggccttgccgaccagtggctggaggtatatgagccggcggcgatggacagtacgacggtttttgcgccgggcgttaaggttcataaggattccaaacgtacgagcaacacaaaggcgacgagtgacacggtatcgaacggctccatcatccacgtttatgacgggcagattatgatgctcacagacggcggcaaggtggtcgattatacggcggaaccgggttattataaggttgaaggctcctccctgccctctatgttcggcggcgcgttcaaggattccgtcaaggaatcgttcaaccgcgtccgttacggcggcataacgcccacggcgcagcgcgtcttttacctcaacacacaggaaatcaagggccttaaattcggcacgccgaaccctgtcaattattttgacaacttttataacgcggagctttccctgcgtgcgcacggcacttattccattaaaataacagacccgtttaaattttatacagaggttatacccaggtcggctgtaaccgacggcaggagcgtcgatatttctgagctcaatacccagtatctttccgagttcctggaggccttccagtccgcgctcaacaaaatgtccgccgacggagagcgtatttcgtttgttgtttccaagagcatggagctcggcaaatatatgagcaccatcctcgatgacggctggaaccagatgcgcggctttgtcgtacaggcagtcggcattgcgagcatctcctatgacgacgaatcgcagaagctcatcaatctgcgcaacaagggcgcaatgctccaggaccaaggtattcagggcggctatatggccggtcaggtcggcgagggtatcgcctccgccggaaaaaacgcggcgggcgcaatgaatggctttctgggcgttggtatggcgatgaacgccggaggcagcattatgggcggctaccagcagcaggcggcaaaccgtcccgccccgccggaacaaaaggaagctgcttggacctgtgaatgcggcgcgcagaacaccggaaagttctgcagtgagtgcggcaagccaaagcccgcgccagcaggcggctggacctgtgaatgcggcgcacagaataccggaaaattctgcagcgagtgcggcaaaccgaagccggcttctaaatgcgcgagctgcggctttgagccggaaggcccggcgccgaagttctgcccggaatgcggtaagccgtttgcgccataacttaacacgataaaagagggaggcgttcgcctccctctttctttttacggctttaaaaattccatgcttaccctgtaaaagtcttttggattggaaagcattgcgggatgccttcccccaggaaatatatggattttcccatggccaatcttttgaaccagtcctccatacgtgttttcaaaaaaatccgagtccatggcacatgtaaattcgtcctctttgctcccggtgaaaagaatttccgccttcagctcttgcagcggcttatggaagaacacgccaatctcgttgtcatgcttcatgacggcgcttgtgtcattgtcgacaacctgttcccaatcgccgccgtgcatatagtaataaaacatccttgcgccttcgtcacgcttggataattccctgtcccgctttatgttttttgtaaatgccttcaggggcctctccccttcaaagctgtctgcaattacctttttaacaagcccggggctttcaagcgcaacattgatggccgccagcgctccgccgctgctgccaatcaggtttacatccgtatattgtttttcacgcaaaagcgcagccgcctgctgtgcctcataaaaccataaatctgccggaaattcttcaagcctgtctgatttcccatggcctaaaaaatcgattaaaaccacccggaagctctctgcgtatttcattacggcctctgcaaacatattagaggaagccgtgtttccatgaagaaacaccaacggcgctcccgctccaaattcattgtaatatatccgcttattttgaaaagaaaaatagctcatattaaagccctcctaaaaaattctctgcgtgcataggcagggcttccaccccgcagtcaagcaattctcatgtcactcacccccataaaatttattgtaattacatcaccgtcaaatccgccgctgaaaaaggcaccgcccttttcagctctgtaaggcttgtttccacctgatatccgatttttcccgcgctgaaaataattgtatcgaatgacagcgcggagctgtcgataaaggtagggaacggctttttcatcccaattggcgaacagccgccatgaatatagccggttaccggcagcagctccttcgattttatcattgcaatcgatttttctcccgcgcaggcagccgctttttttaaatcaagctcttttgcgacgggcacgagaaatacatagtaccgcttcgatttccctaccgttacgagcgttttaaaggtgcgcgccggatcttcccccaacgcctttgctacctcctcgccgctgacagcgccggtgcccgcgtagctgtggctgatatacggaattttcagcctgtcgagcagccgcataacgtttgtcttatattccatatgggttcctcctgaaattgtcttttcaaaccagtgcgggaacggctcagctttttagtggaaacgccaggacaaattcactgccctggcctttattgctgttcacgcgcacaaaaccgtcacacaaatcgcagacatgccggacgaggctcagcccaattccatagccgttcttgtttaatttcctaatctggtagccgtgcccaaatatgagttccacctcatcctcgctcaatccgataccgtaatcccgaacgtggagcaaaacgctgccgtgctgctgctccagggttaccgtaatcgcgttcccggcaccatatttgacagcgttgtccagcaaattgtcgatggcacggcgcagccattgctccttgcctaaaatcatatatgaggcgtcctcgtcaaattggaaggtcaaatcggcatagacgcttcgataggcgtcgcactcctccgccgcgattaacgccaaatctaccgtttcacggctggcgctccggtgtgcggacacggtcagtatatcgtccaccgactgggccagcttcccgatgtcctgaaccaaaagcgggtcggattcctgattcagccgggctttgatgagcataatcagatttttttgttcatgggcaatgaaggaatggagccgctgctggtcttcctcatacgcggaaagccgcgcgtggatgccctggtactcctcctttaagtccgtctcccggacgcgttccagctccgcctccgtcaaatcccgcaaatcactggcaataaccctgttatgactgcgctccagggcgcggacgccgagcagcagcacgcaggagaacagcaggaccagcaggcacactgcggcaatcagcaggggcaggtagcggaaaaaagcctctcgaaaatagtcgtggagctccgtcgaggtgatggagctgttcaggatggcctgcccgtcctgcggggcataaaacaaaatttccggcagcgtgctggtatccgcgctggaattgcgcacgaacaggtagaagcatactacaatgctcaggctgagcagaagggtatatccggcaatcagaagccaggtttgctttttcactccagacacaggtaatacccctttcccttttcattgcgcagaaccggcacatcaccaatcttcagctttttcttgatatttgccatgtggacgcggatgactccggaaaagggatcgaagctttcgtcgtagacatgctccgccagctcctcgtttgaaacgacgcgcgggtggcagcttgcgaggtattccaaaatatcaaactccttaacggagagggggatttcccgtccgtcgagcgtcacccggcgggcggcagggtccaaagacagccccccgatgagaacagccggatttgcccggcccctgaaccggcggattaccgcctggatacgggcgtccagctccgcaaagtcaaatggctttgtgatatagtcgtcgctgccaagccgcaggccacggacccgctgttccagctcgctgcgggcggttacaatcagtacgggcgctgaaatcccccggtcccgccagccctccagcagctcaaaaccgtcttgatcaggcaggttcaggtccagcaggattgcgtcgtaatcattatcggaggccttcaagtccccgctttccccgtcataggccacgtcacaaacatatccaaagccggtcagcttctctttcatcaggtccgccagctctttgttgtcctcaataattaataaacgcaccgcaatcacccactatcctctaaatttaatgaaaatagtataccacagaccgtgttaatacaaaagcaagaaacttttttctgttgaattccgtcttgccgcagaattaacattgcctgtgatatactggggccaatcccaaaagaaatgagtgagctctgatgtatattttaaaaaacgcgtttcagaatctatttcaaaacgcagggcggaacctgctgacagccgcaatttttctgctggtcatcaccatgagctgtgtggcgctggtggtctacaacggcgccaacgacatcgcggggcagtacaaggaccggctgagcacagaggtgctcctgaacgttgactataaaaaggtcggagatgcgtttggaaaggacgaatcgttccgaaagccagccctcaccgacgagctaatccaaaagctttccgcctccaggtacctgaaaaaggccgtgtacagcgcgcagatggaggcgattgccgacaagctgaagtacaccaccccgattgacacccgtgacatagagatacagcgcgcgggagaggagcccgcgaaaacccgcattccccagtacattctcagcgggttcgaggatttgagccaggccaagccgttccagggcggacaggctaagcttaccgagggcgctttccccacggcggaagacgaatgtgtaatctccgacaccctggcgaagctgaacggcctgaagcccggcgatacattccaggcgaaaagtatctattataacgataagcagggccgtcccctggaggagatgacgctcagggtcagcggcatttaccaccgggaatacgcagagggcgatacggacggcgacagtgaaatcttcaccaaatataagctccttaccgacccgcgctatacctatgagcccacgcttcaagcgtcctttttcctgcaaaacccaaaggagctggacgcctttgccaaggaggcctacgccgccggcctctccgagtactataacctgagcaccgacaccgtcgcctacgacgcctttgtaaagccaattgagcagatgagcgttatctccctgattttcctgtgcgtggtcctggtgcttggggcagccgtcctgctcattctctcctcattggtggtgcgggaacggaaatacgagattggcgtcctgcgggcgatgggcatgaaaaagggcaaggtcgtagcccagctggtcctggaagccgcactcatcatggcggtttgcctggtcgccggcatcgccttgggcagcctgttcgcacagccggtcaccgatatgctgctgtcgaaccagatgtcccatgcgctggacgggccaagccttgccagcggcacgggcggctactccttcggcgggctggctacggacaacacgcctatcacccacatcggcgcggcgctgagcctcacaaccgtcatggaactggtaggcatcgccctaatcctgacggcggccgcaggcgcggtcagcgcggcctgcgcaatgaagtacgagcccatgcgcatcctgcgcgagcggaactgacaagggaggaaacaacatggctgttttatcactcaaaagcgtggggtatacctacgaaaaaactacaaaaccggtgtttcgagggctgaacgcggacttcgggccgggcaaggtctactgcatcgttggaaaatccggcgcgggcaagacgtcgctgctttccctgctggctggactcgacacctgtacggaggggacgattctgtacgagggcgaggatttatgcaaactggacagggacgattaccgcgccaaaaaaataggcgtcgttttccagggctacaacctgctgcttaacaaaagcgcgctggagaacattgagctctcgatggcaatcagcggcgtccgccataaaaacaaccgggcctatgccctggccctgctggagagcgtaggcattgacggggagaccgcggggcgccgcgtgctgggcctctccggcggggaacagcagcgggtcggcatcgcacgtgccctgtcccacgagccaaacctgctgctggcagatgaaccaagcggaaatctggacagggagacagaaaaggatgtaatgaatatcctggttaatctggcccacacgcaaaacaagtgcgtgattatcgtcacacattcccagaaggttacccgctgcgcggacgaggtctggggattgaacaaaggtgccggcctggtctacttggggacgggaggcgaagccaaatgacgcaaagagacagcgtattggcttctgcgtttttaccggcgcagggcaggaaagccctgacgatatgacgccgcgccccattctgtgaggagggtattaccgcctgtgtggaaaccctgcgcatgaaaacggcttgagcctgcggacggcggcacggcggttaaagccaggcctttaaagaaccccctggaagaggaagcacagcagcaaaaaataccggcatagccaattttggttatgccggattttttcggccgcgtatacaaaatatggatttcggctgcccagaaaaatatggtacaatgaaataaatatcataaattgtcacacgggcagggttttgctgtctaactatataggaggtaatcatcatgaatatgaaaacaaacgaagaattatccgtattaatcggcaaagccaccgccggcgacaaagagtcgctcgaaaccattatcacgagcatacaggatttggtttttaacctctccctgcggatgctgggaaccttccccgacgcagaggacgcgtcccaggatattctcctgaaaatcacaacgcatctgtcgtcgtttaaaaaggaaagctccttttctacctgggtgttccgcatagccaccaaccatttaatcaactacaaaaagcatatgtttgcccagtttcccctaagctttgagttttacggggacgatattgagaacgcggatatcggcggcgtacccgatttgacgcagaatgtggaaaacgcgcttcttgcggaagagctgaaaatgtcctgtacgaacgtgatgcttcagtgcctcagcccggatgaccgctgcatatttgtacttggaaccatgtttaaggcagacagccgcgtcgcgggcgatattcttggtatcacaccggaggcataccgccagcggctttcccgcgtgcgccgtaggatggcggacttcctgaccgcttactgcggcgaatatggaaacggcaaatgccgttgtaaaaacagggtaaactatgccatacaaagccgccgcctgaaccccggcgctttggactatacgtcttcaaaagagcttccaaaggaaacgcttttacagttcaaaaacgcgatggaggaaatcgacggtctgtccggacagttttcgttcagcaggctctacgaatccccggagcgcataaagcagttttttaagagctttttggaatcggccgcgttctcggccgtaacaaatccgcgggagggctgatatatggatacctcggctatattaacatatctaaccgaattgcgtgaaaacaataaccgtgagtggtaccatgcccacaaagcggaataccgtaaggcaaatgagcaatttgaagcgctgcttcaggaactgattttcagaattggggaaacggacggcagtattttacataacaatccgaaagagctgacgttcaagcttgtgcgggacacccgcttcagtcacgacaaatccccctataacccggcctttcgcgcgcatatttcatcaaagggcaagctgcctgttcccgttgggtattacattatgataaaacccggcggggaatcctttctgggcggcggcctttttgcggacatgttcaaggacgcaaccgccatggtgcgcgattatatcgcagtccatccggacgaatgggaggaaatcatcagcggcgcggaattcagagcgcttttcagtgtgcggggaaccgccttgaaaaatgttccgaaaggttatgacaaggagcatccgcaggcgcagtacctgaagcacaaaagctggtatttagaatatccggtcggggacggggagcttttgaacgcggagagcttccttacgcattgtgttaagattttcaggcagatgaagccgtttaacgactatctcaaccgcgcgcttgcggggtttcagatgccgcagagataatcagtaataacagccgcccgtatattaagacggttccccagaaggcaggcgctttttccagaacccgccgcagaagaacaccacgccggccgccgccggaagaagcggcgaaaagcattccgcccaatacagccccatgtgcccaagcgcaaagccctctgtgagaagcaggcttaatccaaggcgcatgaaaatcgactgggcaatcgagttgaacatcgcaaaagcggcgtgcccggtacccgtcgcgaacgaatccactgtgtacattacggcgtaaaacgcgcagtttacgttgcagcagatgcgcaggtagcgtacaccttcctcaattaccgcggggttggggtcaaaaagggctacgatttgaggggcgaaaataagaatgagcgcggtaacggcaatctgtaccgcgacgttgattttaattcccgacgtgcaggacttgcccgcgcgtttgagcatgcccgcgccgatattctgccccgccatcgtcgtgaccgcctggccgaccgcccagcagggcataacggcaaagctgttgattttaaggccgacccccgccgccgcggataccgttacgccatagacgttaagcatccccgtgacaagcaggtaagagaggttcagcaccaccatttgaacagcggagggcaggccgatttttaatatcgcggtgcatttgtctttataaatacgaaagctcctaaggcgaaagtcaaaaactttcccgcgcttcctgaaaaaaagtacggctatcccaaaggacgcgccctgggacaaaacggtcgcaagcgcggcgcctgccgtgcccatcgagcatgctcccacaagcaggaaatcaagcccgacattaagcacagacgcaattgccacaaacacgagcgggccgttcgaatcccctaagccgcgcagcacggagcacacggcattgtagccgaatacaaaagccgtgccgccgcagataaccgccatgtactgctccgcgtgcggcagcgcctgcaccggcaggttcatcgcgcgcaaaacagggccgtaaagcaggtagcccgccgcggtgacggccaaggccgagataaacgatacggaaaacagcgttcccaccgtctggcggacggcttccccattgttcgcccctttaaattgggcgaccaggacgcttccgcccatcgtgacgcctgtgcagatggaattgatgataaagcagagcatagcggcgctgctgatggcggacaggccagcgctgccgacaaaatgcccgacaaccgccatatccgcgagattatagcaagcctgtaaaacgtttgcaaaaaagatgggcattgcaaacgccaacagctttttgggtatgcttccaaaagtaaaatcctgtgccattttggttcactcctaatgaataagactgtaaaaagggcagacatgtgcctgccccccgcacttaaaacagcgcaaaaaggccgcggacgaagcatcgtccgcggccttttaaacgcgcgttccccggcaaacggtacagcaaagcagggcatgggggtgccatgccgcctttcacaccatttgccggcgaagcgggataaggattccttatccgtaaagccccgtacaatgtttcgccggttccattgcaggagcatttacaatgcaaagtctcataacgcaaaccttccttttggcatggcctgattataacgcacacgatttgctttgtcaaacccgcccctgcaggaatatccttcctggcaaaaccggtgttgacatcaaagcgcaaagcgtctaatataagggcacaaggataaaaacacggcgcggttggtagtccgcgcgccggaaaatgtttccggccagtaacctgccctcccatgggttgtccgttctttgcgtattttttaatgggaggaatcattatgggcataacgaacgccaggttgaccgttttttttgaggacccgttttatattgcgctgtatgaacgcacacaggacggctatacgcaggtatgccgggtcgtgttcggcaaagagccgacggacgccgaggtatacgagtatttccttgaaaactggccgaggctgaaattcagcccgcccgttcctgcgggtactgttttggacatacgcaaaaacccgaagcgtatccaaagggaaatccaccggcagctttcaggtaaaatggcagccggtacaaaatcgcagcaggccttaaagctccagcaggagcaggcaaaggcagcgcggcgcgccggccaaaaacagcggcgcgcgcttgaagagcagcaaaggtttgagctgcgcaggcaaaagaaaaaagaaaagcacaagggcaggtagaacacctgcccttgtgctttttatatctttccctttattataagcccgtgtttattgcagcaggcatacagtacgccgccgtgcatcttagggaaccgcgcttgtgcggcctgttcgggatacagctttataaaaagcaccctgtcataggaagcgtacgctataaaagtgatgtaatgctgcttactcatttcatgctgtaatgtgacatagaaatcatcctcaatttcctccacctggatgctgtgtcctgaatcctcctcctgccgcgccaaaggagccagcttcctgccgcagcaggaaatttcattttcccctgtacaaaataaaatattcccacaatccgggcagacataaaactttatttttttcatatttcccccatccacggcgttttgttccaaatcgcccttgagtattttttccatatcaacttttaaaacggcagacagcccgccgagcagggacacatcgggacagccggcgccgcgttcccatttcgataccgtcctgtcactgatatgcagcgcatccgcaagggccttttgcgtcataccattttcgcggcgcagcctttgaatcagcgcgccgactttgccgcagtccattttcttcacctccctctcaaatcataccttcaccatgagataaatgcaacaaacgctccgtagagttctcgttttttaatcgcggcggctggcttgtaccaaggtgtggcggaagcccttacctattttttacagaaattttttcaaagcatgatagaacagcaagccttcgggggagtatgatgttgtacagaaaacgacggaggcgtgcgccatgattgaaacaaaaacagaaaaaaagcggcaggctgtccttatcctgtctattctgggcgcggtcctgcttatcattaccgctataattattatatggcagccgtttcaaagcaacgaaagtgcgccggccgccggcggtatgcaaattcagaagggcgcggtcgattacaacacagccgtgccggacaataccggagaggaaagcggccagccgggcattaaaatccccggttatcccgatattaccataaaggcgggtgaatcctccatcccgctcacgctgctcaatccagagggcaatccctgttactttgcgtttaccgtcctgattgacggggcgtcctgctacaagacagggcttgtagagcccggaaaggctatccgcggtttttctgccggcagcacgttttcctccggcacgcatgaacttaccgttcaaatcgatacctattcgcttggcggcaaaacacaaatgaacggggcgcagacaaaaaccacgctgaccgttacaaacgcataagctatcccttccccaacagggtttaaatagaaaaacaaaaggttatgaaaaaaaggagtatttcaaatgaaaagagcaagaatttttacatccctgctgcttgcaggcgtactctgcgcgggcagcacagccgcgtcctttgccgcggttgtggacgaaaacgccccgtccgacagcgtacagcagaaggtaagcttcacaaagacggcggaagaggttgtcccctcctataccgtgacgattcccgcaaccgtatccctatcgagggaggcccaagacctcaccttctcgatgaacctcgaggaccattcggagtttgtcccgaacggcaagaaggtgtctgttaaaatcgaaagcgcgggctatccgacggtcaacaacaagttcgccctgtgggattcccgcaacctgaacgaggcggaataccaggtttatgaaaccgaccattccgcggccaggcacacctataacattggggacgaaattgcttcctgggagggcagcaactggggtaccctgacaaggagaatccaggtaacggactttgaaacgctggaagcgggtacctacagcggctttatcaactacagcatctctctggaggataaataaacctctgacgcaggcggcggggcttcccgtccagcaagagagaaaggggcgccgcccggcggcgctttgggtagattaacatgaaacgagcgtttcttgccatagcatgcgccgtatcccttgtcctatttatgggagcggggcgggcggcggatttttcgacggatttgaccattgccgtgccgaagcaatacgggattacgttccttgtaacgggcggcggcagtatttcggtcgaacgggcggaaagcgcctttgccgtgacggacagcaaaaaaattgttgtaaaggaaaacgagccgcttaccatccggtttaatcccgacgaaggcttccgtgcagcaagcgttttgcttggaacggcggagctggcggggcaaatcaaggacgggctcctaacgacgcccggctttacaaaagaagagaccgtcaccgttacctttactgaaacggctgcccagccatcaaatcgcccttccacccctgccgtccctgaccctccgcagggcggcgggaaaccggttggtacgggcgccgcttccgccgtactgcttttcccgtgtatgcttgcctcaggctgcattgtttttttctgccggaaagggcgggacgggacggacacattttcttgacagtatgtgtatttcccagcaaaagagggagaaaccgaatggtttctccctcttttcagcattttaccaagctttttttattttttcacaggaaaagcagacggagccaaagccatgcgcggtaacgctaagacaaatatccccgcatgaacccgcgcccgtccctgtgtccgttttaatcagcgtatcctgctgcccgcggggatggaatcgtccaaaaacagcaccttgaccccttcgccgcagtcggaagcgagaatcattccctcgctttctacgccgcagagcacggcgggcttcaggtttgcaacgagcacgaccgttttcccggttaaatcctccggcgcatagaactttgctatgccggaagcgaccgtgcgctcgcgctcgccgtcgtcaagcgtcagctttaaaagcttctttgcctttttgaccggctcgcacgccgtcaccttggccgcgcgcagctcgaccttcataaaatcctctatgccaatctgcgcaaggccctcgattttaggccgttcgtttttctttgcctgctgctcctccgcctttttctgcgcgtcgatttcgtcgagcagcttcttcgcgtcaatacgcgagaacagcggcgcagccgtgccgacccgttcgccggttttcagcgcgccgaacgcgcttaaggaatcatagccggaaacggagcagttcatctgctccaggattgcctttgccgtatcgggcataaacggggtaagcagcacagccaggaaacggatgctttccagcaggttatacagcacggtgccgaggcgcgccttgtccttttcgtccttagcgagcacccagggcgcggtttcgtcgatatatttgttgctgcggcgcgcaaggttcatgattttgtcgagcgcgtcgctgatacggtactgcgcaatcaaatcgtcgacgtccttcacggtttggagcgcaaggcccgaaagctcgccgtccaccggctccttgcaggcgggcggcatgatttccccgccgaaatatttgttgctcattgcaatcgtacggttgacgaggttgcccagcgtattggcaaggtcggaattgaagcgctcaaagattgtttcgtacgtgatagagccgtccgaggtatagggcatctcggaaagcaggtaatagcgcaccgcgtccacacccagcagctttattaaatcgtcggcataaatgacgttgccgcgcgacttgctcattttatccgcgccgaacagcagccacggatggccgaacacctgctttgggagcggctcgccaagcgccatgagcataatcggccagtaaatggtgtggaaccgcaggatgtccttgccgataatgtgtacgtcggccggccagtattttttgtaaagctctccggagccgtccgggtcatagccgagcgccgtgatatagtttgacagcgcgtcaatccagacataaacgacgtggccggggtcgaaatcgaccgggatgccccatttgaaggacgtccttgaaacacacaggtcctgcaggccgggcttgatgaagttgttgaccatttccttcttgcggctttcggggtagatatagtcggggttgtcctcgataaaccgctcgagacggtcctggtatttggacaggcgcaggaaatacgcctcctccttcgcggcctttacctctctgccgcagtcggggcatttgccgtccttcagctgcgacggcgtccagaagctttcgcacggggtacagtacatgccctcgtactcgcttttgtaaatgtcgccctgctcgtaaagctttttgaatattttctgcacggcgcgctcgtggtaatcgtctgtcgtgcggataaatttgtcgtaggtggtattgagcaaatcgcagatgcgcctgatttcccccgctacgccgtcaacgtattcctttggggagacgcctgcctccctggcgtagtcctctatcttctgcccatgctcgtccgtaccagtcaggaagaaaacgtcgcagccctgcattcgcttgtaccgcgcgatggcgtcggtcaaaacaatctcgtagctgttgccgatatggggcttacgtgatgtataagcgattgctgttgtgatgtaaaacttctttttacacatgggttcttcctccaaagatttattgaaacggcggtttcccgccgttatctgccgattttattattatatcatcccgcgccgcgattcacaacttcaaaaggatattttttccgcaattgttaataagccgttttccagccggccagagggcgtaccagcaccacacgctcaatgtcacaaaataccgcatcgcgtcgtttcttcatcagaaagcacatgaagcaccacacccacgaagccgcttttttgaaagcgtgcaaggtaccattcccacgaaggattccgcgcgaaggcgcggcggtgatgcgtcccgcactatcatttctacaccccgtacataaaacggggattgcaagggcgcagccccctgcccggctggaaagggacagaggaaagctgcggcggggttttccctgccgtcagaaaagggattgcaaaaggggggaaccaacaaaacggtccccctcttttgaaaaagattacataaaaagttttataaagaaatgcaaatagcagaaggcttcaaaaaaacagaaccaggccgttcgcggaacaaaagctacttggcctgttccagcgcctccagcaaaatccgcacgccgaggcgaaagccattcacaaagttttcgtactcattgatgcagttcctttggctcatatcgtccatataattttggaaagccacccgttcgccgccctccagtatctcgtgaaaatgctcctccctttcaaacacccgttccgtcagtctattgtattccgggctgtcggggacggctgaggtgttcggaattacctcgctgaagtaaatctgttcaagcagtgatttcattatagttaacctccaattgatacgttattacactgtaacagaaggttaacattcgtatgttattatgtcaatgcaatcatacagattgtatgacggatcattcaaattgtatgattgcgcggcaaaatggtgaatctgaaaagaggaatcacgcaagtcgatttgagtaaagccctgggattgagcaagtccgcatatggcttgtatgaaacacgccgcaggaatatggacatggaaacgttcttaaaaatatgcgaatatttcggcgtggagccgaacgacctgattgggaaaaagaaaacaatttgagcagaagacaagcccgccatacggcgggcttttgtttattccccttggctgtcgtgcagaaaatactttttccagtcatccggcggcgcgttccaaaaccacgggaaatcgtcagccgtaagctttggcatgcgcttatttttgggaaccagccccgcctgctttaactccttccagaaggttctaaaaattccgatgattttttcgagaaattccgggcgtcgttgaaagatgccgaagagaatcaagttgtaattcatttgttcttttaaagcttttatcagcatttggtcgttggaatatatatcaataacattatcttttatatatgcaattgaaggccacagtatattttctgttctaataaataaatcaagtgctttctctgaatttatatcagtcacactggttaaaaatctgtggtttcgattataaaatatcataagttcactagaataaaagccccgtttttcagtagagactgtaaaaagaatttggtttaaatttgaattttgcatgatttccggacaaagtatttctcgctcttcctcaaaaggataggtcttaaatttttgtttttcattgaaggagcgtaatgttatatcaaacgcgtttcccaggataattttacagtcaaccctgttcaaaagcgccgatataacccccactcggataggatgttcagaagccgagacgacaatcaagacaatttctttatcaaagcgcttttgtaattcccgggcaatctgcccgtaatcaccatgccagccacaaaatttctcgtccagtaccagtttatatgggatatcttcgagctcataaaaaaaagaaattctatggcagcccttgttatcgtaggtattcaggggaacccacttttttaaaaacgcgctttccgtttttgtcggggacatatcatcaattttctgcataacgcgattagccagctctgaaaaataaaggttataacactgccggtcgcgctccagctgttcccatttttcagtaaaatgctgttccatccatgtcagaatgatattctcgattttcaagataaactgttgacgcctttcatcatctaatacgtttgcccggtccggcgtcaaggtcaacagatattcccgcttaatatttagataaacatcgaaattaactaaacggggagaacgatccatttgagacattcgggatagaattctaaaccctttttgtgcaataacttctgattccacgacgccaccgatataaattttaccctccaggttttcatcgtcaaggtcgatggtatgaaacggcggtacagtatattcaggatactccggcttttcaaagcggcagctcaccccgcccgccgtaatgtcgatagggaaggtgggaaacggcgtaagcgttttgattgtttcaaccagctcgtcttccgtcagttcaatgctttccttcaatttaagcgtgatttttgtgccgtaatttttccgtttggagccgcgctggataaaatagtcttgcgccttaggtatttcgacataaatcggaagatacccgtccgcatcctccgggaagcggaggctttctaccgtgacgctttgcgcaatcataaaaacagacaggatgccgatgccgaattcgctcgtgacgtcgagcttttctttatcataagggaagtccgcgcttgaataatagctgttgcctatgttgataaagtaacgcgtgaggatatactcgtccatccccatgccgttgtcctccaccgttaaaaggccgtccttcatcgtgaccttgacgcaggggcggtaggcgtccgccgtgccgttttgctcctccgcacaaacgcggtgcttgatggtgtcgaacgcgttttgcaaaagctcgcgcagcgcaacgtttgggtcgcggtacaggcgctcgcccattaaaagctccataacccgcttgtaatcgagcgcaaatttaaaatcagaataaatatagctgccgtccgatttaatctgttccgttttaacacagttttcaaaatcaaagcggtactttttggcgatatcgtcgttaattcgcttggacagcgccagcgtttccttacgttcctcctcaatcacgcggagaaagccaagggtcgcgcgctggatttgcggggagctgcaatatgcgctgtattcaatatgggttggcctaatgtcgtgtccaacgacgctaagatgttttttccattcctcaatgctcttggggttctgcgggtttacaaagtggtacagcgtttccggcgttctgctggggtcaaaatccattaggtccgccatacgcagaacaagtgcaagatattgtacatttacgcgcagcccgtcgctaaaaagcgcgtttcgcggaaaatcattttcattattcagtttttttgccggcaggccgtggctgtcgcagattgcggtgagaaaccttatgaaaagctccccgccccatttgaccggcggtacaatcaaaccgttttcgaaccagttttttataatcttatggctccttttcacgtgattgcagcggagatagtcggtaagcttttgtttggcctcttcggaattgccctgaaaatcgggatgctcctctatgattgccttaatttcatcacgcgaggcggtcatcccgacgtcatgcaggtaggcggccaaaagcaaaagtgtcagctcaaccgcgttcaattcgttcagcgtatcctccgggattattttgcccatcagctctgcgacattcgcgctgtggttcgcgtcgtgcagcgtgaattccggcatattcgcatacaccgtctctaaaagaggcgcggccgccgccacggcctttttgacaagctccgacggcgcgtggtctttcccctctttttgcagaagcagtttatatagcggcaggctttccagccttataagagcgtcttgccccatacaggaggtcactccttttattttccttgtttttcgccatgagattcataatttttgtgaaaaaacagtcaatataatattatcataaagtaaaaaaatgtcaatcttttatgattttgtaagtattttgttctaaaataaaaacacttttttcaagagcacagaagtcatttttgcggaggaatcagccggagattttcaatggtaaacgcgccctgtttcttcttcatatatttgggatttaaaaagacagtaaagcatagttcaaaaatgtttttccatgcatcgcagcggggcgtcaatgtttgaaaagaaaattggaaatcctgcgcgtagtcagagaggcgcagcccgcggtcaacgattttattcttatgttcatccttgatttccagctggattatggaaatctctgctgcgtcttttatccggaacgaaaaggaatagtcgttctcccaaaacgccgtccagtcttcactcggaacgtatttgatcaaagccatgacaaattcccgtttttcaaagctcggacagtcggttgcgtcgatttctaccacgatatcctgtttatcgcatttgatttcacatgctttataggagccataggaaacaatcggcgccacttccttatacggtaaatagttttccaaaatgccaaaagacttttgctccgcggtaagcaaacggtatttattcgattctgccgaatactccattccttcggtctgctgtgtcttttgtgttttgtctttaaaatatagtattagatgcctgcgcaaaagcttccggagctcggcattggatttatactcaaaataaatgccccggtatttgtatgtgtctttgaatttacgcagccgcgcctcttcctctgggtcggtctcgcttttccgtacgggtttatccgaaaagtagacgaatacattacggcccatctttatcattctttcgatttcctcaatcgttccggagtcataattttttgtcggactgccgaccttattgccaaaaatagcaatgacggcgtcggctccatcgagcagctgccggttgatcagctcctgcggcgttcccccggattcgggatatgtactttttagccagtggcggatatcgatccggatgttcaaaaagcttcctgtgtcttcgttgaactcgtcgattgcctttttgacaacagctaattcactttttatgtcggatgggcatgaaatcacaaaatcaaaacaagtaatatcattcaaagagacggcctcctgtttttaaaaattatgattggcggattagctctgtaagcttctcttttgaaatccacgggcgttttcgatggagcatcctatggcagttggaacaaaccataaccagatcctcgatttttgttttttctccctccatcattgcagatataggcttgatgtgatgcgcttcaatatagtcttttccaagctcaccgtatacctgttcaaaatcaaatccgcaaacctcgcaaaaaatcctgccatgctcacgcttgtatttttcttttgcttttttgctcaatgtagaatttcgctcccgggcaatatgctggcgaagactccccctgccttcaggatagccgcagtcatcctccgtgagatcaacgccgatattgtcgagcgtaaaatccaccaatccccaaataccctttttactattcactccgtacacggaataaaatgtatgatccgtcccataacgggtacttaaggaatgtatttgtaaggtttggctaattgtttttttgggagtcctgcttcctacctttacacgtccgcgtgcaatgaccctttcaagaatctggtctaaagagccgattccacctaactcctttaggcattcgataatttcgtctttccaatgtacttcttccatgttcccctcctgttaattgtgaatttgcttcactattatattatctcgtttataaaaattgtcaaattgaaatcgtttttgtcataatataaaatttctaactttttgggcaaaccagaataaaagccgcccggcgctgccggacggcttttaatttaaacttatcaaataatctgatcacatcagcctgcggaaaagctccttcaagtcctccacgctcgtgtccttcgggttgccgggctggcacgcgtcgtcataggccgactgcgcaaggaagggatggtccacttccctgagcgcctccagctttgcggggatgcctacgtcggcagagagccttctcaccgcttcgaccgccgctttgcggtactcctcctgtgtcatggaattgacgtttggaacgcccatggcgcgcgcgatttcgcggaacttctcccccgtgcaatccgcgttatactccatcacgatggggagttttttgtccattactttcaagcgacgcgacacactccacatgattcgtatgcgggaacatatcgaccggctggatttctttgaccgcatagccgttctgcgttaaaaagcgcaggtcgcgctgctgtgtctgcgggttgcaggaaatatatacgatacgcgcggggcgcagggctgtgagcgcgtttaaaaactccatgctgcacccgctgcgcggcgggtcggtaaatacgacgtcaatctgctcgcccgagcttttcagctcctgcatgaactctcccgcgtccctgcaatggaagtagatatttttaatctggttttgctttgcgttttcaattgcgtcgcgcacggcgtctcggttcagctccgcgccgattacctgttttacaaacgcgctgcaataaatgccgatggtcccaacgccgcagtacgcgtcgattacgatttcttttccggtaaggcgcgccatttcaaccgccttgttataaagaagctccgtctggacgggattgacctggtagaatgaccgcggcgatatcttaaatgtccttccgcaaagggtatctgtaatatagcctttaccataaagcgttttctccgccggcccaagcatcattttatacggatggtcgttcacgttgagcacgattgtcgtaatgtccggatgctccttcaaaagcgcctttacaaaattgttttttgctgggaacgttatggtgcttgtaacgagcacgaccatgatttccccgctctgaaagccctgccgcacgagcacatgcttgaaaaagccgctgccgtcataggggttgtagggccttagcttaaaggatttgagcagcgcgcgcaccgaagctatgatttcattcgctttttccgtgttgagcatacaggtatctgtggaaacgacgccgtttgtctttgactggtaaacgcccgacacaagcttcccgcccttaaccgtacgcagcacggcctgcgccttgttgcggtaatggacgggggctttcatcccaatgatgggattgacgcggcagaaggaggagagcaggcggtttacgagcccctgcttccatctaagctgactttcataatccatattctgcagctggcatccgctgcacttcttatatacctggcactgtttgtatgggctgttttccatttgctgccgcctttcattttacactgataatgacaaagggacgccaaaaggcatccctttttgctttaaatgctacgcctatgcagccggctgcgccgccgtggctgccggctccgtcgccttttccctcgcaggtgttgggcgctcgattgcgctttgggagaagaggatagtcagcgttttctcgtcgcaggtaccggaggcgtctgtaatcccgtttgcgttctggaattccttgacgacagcctgggtcgtttcgccgtaatagccggtaatttcatccaggggccaaaaattcaagtcgtcgagacgcttttgcacggcgagcaccgcatcccttttgccgtcctggtcgtcggcttcgttgtccgcgccgtcttcaagcttcagggtaagcccctttattttaataccgtactggtcggcaacgctcttctgattttggcctgagccggacagggacgggtagattgccgccgttatctgcgcaaccgcctcaagcgcactctgtccctggcgctgcatcagctcggctggaatttccactaccctgcccttgcttacggcgctcagcttgctgtaatttgcgtcttttttcatttgctccgcaacgccctgcgcacagaagataaactgggggttctggttgcgcagcacctcaaagtcgagatatccgcccgagagatcggacgcaacgttgacagcgcccgcgtctgtaaacagctcgtttgcaaacatgtcgccagtcacggcggcgccctttatatcaaacaggtagcaggcggtatataccacgttgctgtccggaattttccgcatgttgtcatcaagcgccgaaaagaaatcctgcgcggcctgctgccccgcttttttaccggtaatattaccgccgagcacgcggccgatattctggtacattagctccaaatcatcgcgcgaacgtgcggaaacgaagcgcagaaccgtaatgtccgcctgctcaagctttgagagcgtttcggcaggcagtgtttcgtccgcaaagacgatgtccggccccatgttgatcatagcttccgcgtcaggcgcgtttttcggcccgacggatggaagggaatcgaagcccttctggatgcattcctcggaacgcgccgtcagcttaagagaatagccgcaggcagagataatatccgccgcgttgtcggaaagcacaacggccttctgcggctcgttttgaaccgtatagtggctgatttgtacggggaactcgcttgtctgcgggtctgcgccgcaggaagcaaacgtcaggagcaggcaaagcgcggcaaggatacaagctgattttttaaacatgggaatctacctccgtattgtcgttttcagtaaagcaggaatcgataaactggcgcgcgcagcgcggggagcgcccgccccgctcaagcgcccagcgctccgcggcggaaagcagctcgctctcgtcggtgtgaaggccgctttgcttagccatttcctttacgatttccaaatagctttttttatcgggcaccgagaaattgaccgaaaggccaaaccggtcagctaatgaaaggctttcctgtatggtatcgttgcggtgcatgtcgtcgccctcgcggtcggagaaattctcctgaatcaaatggcggcggttagacgttgcataaatcagcgcgttttttggacgggctgcaaggccgccctcaagcaccgccttcagagaggcgtaacggtcgtcctgcttctggaaggtcaaatcgtctatgtagatgatgaatttcattggtacggccgcgattttatcgaccagcagcgggaaatccccgatacattccttcggcatctcgacaatgcgcaggccctcgtttccgtaacggttgacaatcgccttgaccgtcgaggattttcccgtccccttatcgccgtaaagcaggcagttgtttgcgctttttccattcaggaacgcgagcgtattgttaagcaccaggtttctttggtactcgtagccctttaggtcgtcaagtgaaatcgggtcgggatgatgcacgggcttgacgccgccgtcccgccagataaaggtacgccagcgcgcaaaaatgccgcagccgttttgccggtagaagcgcgcagcattttcaatccgcacctccttatcccgaagctctttgaccggctgccctgtacgccagcgcggcagggtcgtggcgatatcgcggatttcctcccggaagcggtagccggaaaggatgtcctccggggtaagcatgcccgcgccggtcagggaatcaaggtcgcggcgcgccgcacggaggagctccgtacccaaggtattctcctgtttctttgcggccgctttagaaaagcagttttcatcgtaaagggcggccttcgtgatacagccgcacaggttttccccatagccgcgcgcataaagaagggaagcgaacgcgccccacgcctccaaaaattccgcaggcggagcgttatggcagcacagcagcctgtaatacgccttcggaacgctgcggttcaatacaccctgatagatggaaagggccgacagcaaaagcgcatatctttccgttatatccatagtggcaccttctataatatgaaagtatgatttatgggaatagggccaattgcctgttaacctatatattctacaattttttcccgcccaagtcaaacaaagcagaaaagccgcgcatatttatgtatgaaccggcccgcagatgaacaggttttgtgaaaaaaagaacaaaaccaggcgttttttgcctttatgaagaaattgtaaaaaaaatttaaaaaaagggttgcattttgatttttgggatgatataatagcggagcagtcgaaacactgcagcatttttagttggtgttaatggcgctgagggtccacccgttcccatcccgaacacggaagttaagctcagtagtgccgaagatacttggctggcgacggcctgggaaaatagggagatgccaacactttaaaaaagcttccacccagtagggtggttgttttttttgcctggattttttaataggcggcttatccttacagcaccgccctattaagttgccaatcaggccgccctgggaatttgggttagggcggcgggccttattcttaatctaccgggaactccttttttcctgtagcttattttctccactggcatatccagtggccgattctttgaacataaaaagggagccgcattttttgtgcggctcccttttttactgctgattatacattaaagcggaacagcacgacgtcgccatcgcgcatgacgtaatccttgccctcgctcctgacaagccctttttcctttgccgcggccatggaaccgcacgccatgaggtcatcgtatgctatgacctccgcacggataaaaccgcgctcaaagtcggtatggattttccctgccgcctgcggcgccttcgtgccctctttaatcgtccaggcgcgcacctcctgcttaccggcggtcaggtaggaaatcagccccaaaaggctgtagcattcgttgattaagcggtcaagccccgactgggcaaggcccatgtcggcaaggaacatttccttttcttccttgtccatatcggcgatttccgcctcgagccccgcgcagatggggagcacggccgcgccctcgctcttggcaatttcactgacctgtaagaaatattggttggaggcaatcccctcggagaaatcgccgtcgctcatattggccgcgtaaataaccggcttattagtaagcagggcaacgcctgcaagcagttccttttcctcttccgtacaggaaaccgtgcgggcggatttcccctcattgagcgtatcgagcacgcgcttgaagaaatcgagctcggcttgatattttttgtctgccttaatgagcttctgcgttttgtcaatgcggcgttcgagcatttccacatcggacagcaccagctccaggttgattgtctcgatatcgcgcttcgggtcgatgcttccctccacatggatgatgtcgtcgttttcaaagcagcgcacgacatgcacgatggcgtcgacctctcgaatattcgcaaggaacttgttgccgagcccctcgcccttggacgcgcccttgacaagccccgcgatgtcaacgaactcaatcgtcgcgggcgtgtatttatccgggtcgtacatttcggcaagccggtcaagacgcttgtccgggacggcaaccacgccgacgttcggctcaatcgtgcagaacggatagttcgcagactgcgcaccggcgttcgtaatggcgttaaaaagcgtgcttttgcccacgttcggcaggcccacaatacctaatttcatatgaaagcttcctttccaaaaagaagaattatttgacaaacagcgaaacaagcaaacacgccccgtagatgacgggctgatgaaggatatagatgattaaagcgtgcctgccgataaaggaaagcggcggcaccctttttttatagagagcccttgggaaccgcccgctaagcgcgagcctgcccaggaacgttccgaaaaggaacgtaaaaatatggggcagcagagggaaatagtcggcggaaaaaaagtgcgggcttttaaatccgagaaaaaaaaggaactccgtctggtaaagctcattcggcagcgaaacgccaagcaagccgggtattcccagaaagccctgcggtatcccataggtaataaaatacaaaaccgcgcaggcggcaagccctaaaccgagcgggattttccccattgccttttgcaaaaggccgaagagaagcatcgcaatagataaaaaatgcaggatgccgaaataaatcgcgccctgcggcgtgataaaaacggtcacgagcgtgacggcggccgcaacgagcagcagctttgcgccgcgcttgacgttggagcggctcaagttgctcgagatgcctgaaatcaggataaaaaccgacgcgataaacggctcggctggggaaaaaaaagaaataaagtcccggccaaccgaaaagccgaagagataccctgtcgtataaaaggcgtggtaaatcaccatcaggacgacgcacaggccgcgcacttcgtccatggtatggattcgcccgcctgtcttgccgctggtttgagtggacgaagctccggtcaagcgatcacctttttctaaaaaaacttgtacaattccatcgtctgttttataatttgagcaatacaccgcaccatgcgcggcgtccggtataaaaacgctgtcctttagtatagcatccggacggagttatttcaatgttccggctaaaataaattcgttggaagggaaattcagtatgaaaagcagcagcaaaacggaaatgataaaggaaacgacagtaacgcgtgaaatgctcgccgacgcggtcggcagcgggagcctcagggtgtatgcgacgcccatggcggcggcgctttgtgaaaacgcggcggcggccctcgcgcaggaatatgtggacgacggctgcacgactgtgggcactatgctatgcgtcgagcacacaagccccacccctgtgggcggacacgtccgcgcgaaggccgtgttaacaggcatagatgggcgcaaattcagcttttctttgacggtctgcgatgacgcgggtgagattatgcgcggtacgcatgagcgcgtgagcgtcaaattagaaagcttccagaaaaaagcaaatgaaaaattcattcagaaatagcctttcacggcacgggaggaggtactttctatgaaatgcagataccaaacggtcatgtttgacctggacggcacattgagcgacagcgcacagggcgtacatgacggcatcgtcgcggcgctcggcgaaatgggcgcgccaatccccgatttaagcgaccgcagccagtacatcggccctccgcttttaagcacgttccagcggctttgcggcatgacggaaacgcaggcgcaggaagccctcgtccgctacagggaggcttacagcagggacggcacgttcaagaaccatttatacgaaggaatggacagcctgctcggggatttgaaggaatccggcgcgaaggtaatcgtcacgacgtcgaaattcgacgagtttgccaaggatgtgctcgattatctggacatccggcaatattttgacctcgtctgcggctcaaacctggacggcagccgcaaggagaaggcggaggtgataaggtacgcggcggggctgctcggctgtcaaatcacaaaggagatggttcttatcggggacacggcatttgatgcccgcggcgcgatagaggccggctgcgactttatcgctgtgagctacggctacggcgatatggaggaaataaaaagccttggcgcttgtaagctgtccgatacggtggatggattgcgtccgtttttgtttacagaggcataatcagaagccgttccctcataaaatggaagagataaagctcttttagtcccgcagcgggacgtatttggggggaacgcgcgtgtttgtggcaaagaaaatatcgaaacgcaccatcataacggcgggcgccatactggcgctcgtgctgctgattgttatcagggccgcagcctgctccaaaacgccggacacagcggtcgcatccaccgggccgtacagccttttggcatcggacaacagggagcgcatcgcatttttaaagcagtttggctgggaggccgagagcgagccggtagaaatagaccaggtgctcatcccgcagaaattcaataaggtctatgaaaactataatgaaatccagcgcggccaggggctcgacctggaaaaatacaagggcaaaagctgcaaacgcatcggctaccgtattacgaattacccaggcggcggggataacgtgcgggcaaacctgctgatttatgaggataaggtcatcggaggcgatatttgcagcacacagctcgacgggtttatgcatggctttgtaaaaccagataaaaaatgaggtgattgattggagcttcaaaggctcgacaggctgctttcatcgcagaccggcatgagcaggagcgaggttaaggcgcttattaaaaagggccttgtaaaaataaacggcgaagcctgccttgaaagcgacaaaaaaatccacggagagcaggataaaatagagttctgcggcaaaatactaaattttaagcggcatatttacctgatgatgaacaagccggcgggggttttaagcgccgcgcgcgaccatcgcgcgaaaacagtaatcgaccttgtgccggaggcatataggcgcaaggggctgttcccggcaggaaggctcgacaaggacacggaggggcttttgattatcacagacgacggcgattttgcgcaccagatgctttccccctccaaaaaagtgtacaagctctacgaggcgcggctcgacaagccgttgactaaggaggctgtagacgcgtttacgcgcggtattgtgttccgtgacgggacaagctgcctgcccgctcgcctgtggcggaaaaatgacgcaatccccgatgcagcctgcgtcgagatatgtgaagggaaattccaccaggtcaagaaaatgtttgcagcatgcggtttttccgtactttatctggaaagaaaatcgattggcgggcttgttttagacggtaaattgcataaaggtgaatgcagggaactcacggaaaatgagcgaaaaagcatttttatcggcaatttgacctaaaaaaagagggcgcaattttcgcgatatcggatttatataaaatgtaagttcaatatttagtgaaaaaaatagtagcctcttctccaaaaatctgttatattattatctgaagtagaaactgcccttagtggattgtttacccgattgtaagggtggatcaggaggtattgtaatggcaaatgtttctttaagacacatctacaaggtttacgacggcggggttacggcggtatccgatttcaacctcgaaattgaggacaaggagtttattatccttgtcggaccgtccggctgtggtaaatcgacgaccctgcgtatgatcgcaggccttgaggatatcagcaagggcgagctgtatatcggcgacgtgctctcaaacgatatcgcgccgaaggacagggatatcgcgatggtattccagaactacgcgctgtatccgcacatgacagtatatgataacatggcgtttggcctgaagctgcgcaagaccccgaaggaggaaacgcgccgcagagtggaagaggccgcgagaatcctcgacatcgcgcatctgctcgaccgtaagccgaaggccctttccggcggacagcgccagcgtgttgcgcttggacgcgcaattgtccgtgacccgaaggtcttcctgctcgacgaaccgctctccaacctcgacgcaaagctgcgcgcgcagatgaggacggaaatcagcaagctgcaccagagactgggcacgacgttcatttatgttacgcatgaccagacagaagctatgacaatgggtaccagaatcgtcgttatgaaggacggtatcatccagcaggtcgataccccgcagaacctgtacgacaagccgtgcaacgagtttgtcgcgggcttcatcggttccccccagatgaactttatcaacgcgacagtcgcgaagagcggcagcagctattcgctgaagttcgatcaatacgacattaagctgcccgccgacaagacggcgaatctcgattcctatgtcggtaaggaagtcgtttgcggcatccgcccggaaaacgtacacgacgagccggagttcctggagagggcgaccgacggcatcatcgaggctaacgtcgacgttaccgagctgatgggtgcggagatttacctctacctgagcatcgcgggcatcccgattaccgcgcgtgtcgagccgtattccaaagcaaagccgggcgataccatcaaggttgcgcttgacctttccaagattcatatcttcgataaggaaaccgagcagaccgtcacaaactgattcgccttatgatacaaataacccgccgcgggcttctgcggcgggtttatttttgctgagtttcattccatttgccgttcaatggttttgaacacgttccatacaaaacgcaaggaagaaaatgttttcaggaccacagcaaatcctattgcttttgcgctatctgtgtgttatgtttaaaataggaaggttatgactatgcaaggaggcaaacttatggaattcactttaagaaaatgggaagaaaacgacgcgcgcagtgttttaaagtacgcggataataaaaaaatatccgacaacctgcgcgatgtatttccccacccttacacgctcgcggacgcggcgctgtatgtcagggaatgcgcgcacagcagcgaggaaaaggatttgtgccgcgctatcgtcataaacggcgaggcagtcggcagcgtcggcatatttgtccaaggcgacgtggcgcgcaaatcagcggagcttggctactggctgggcgagccgttttggggtaagggcgtcatgagcgccgccgtcaggcaaatctgcgccgaggcgtttgaaaagtttgatattgtgcgcatttacgcggagcctttcgcgcataacgcggcgtcccgcaaagtgctgcagaaggctggctttacgcttgaaggcattatgaaggacagcgtctgcaaaaacggcgaaatttttgattcctgcatgtacgcgctgctcaaaaaagaatgagccaaatcaagccgcagctcagggaactggagatagaggatattccgcaggctgcggcattggttcggcgcgtgttcatggaatataacgcgccgtcttatgaggaaaaaggggttaaaacctttctttcctttattacggaggataatgttaaagagcaaatgcaaaagcacggtatgcgcctgttcggcgcgtatggcggtacttcgcttttgggcgtgctcgcgctggcgcgcggcgggcacatcaaccttctgtttacagacggcagttatcaccggcagggaatcgccggcgcactcgtacaaagggccgcacaggaatgccgcaaagctggaaacaccgggctttccgtcaacgccgacctgtcggctgtgccggcctaccgcgcaatgggtttttgcggggtgtcggccgaaacagagcgcgacggcatcaggtttcagccgatggaacttatcatcgcataagcgtaagccgccataaaggcggctttacttcattgcggatattaaccaaacggaggaaatataacatgtatgaactggttcaggcggcaggaaacacctattatattgaatgtcccgcaaaaatgggggtttacgttaaaggcgagggagaagctgttctcatagacagcggcaacgacaaggaagccggtaaaaaagcgctgcgtattatcgagggagaggggcttacgctctcctgcgttgtaaacacgcactcaaacgccgaccatatcggcggcaaccacctgcttcagcagagaacgggctgcaaaattttctcacacggcatcgaggcggcgttcacgcagttccccgtactggagccgtcgttcctctacggcggatatccgccgaaagcgctgcgttccaaattcttgatggcgcaggaaagcaatgtcctgccgttttctgacccgtattttcccaaagagctggaaatcatcgatttaccgggccatttctttgcgatgacgggcttccgcacgccggacggcgtggttttcctggcggactgcctcgcgagtgaaagcacgctgcagaaataccgcctgccctttgtgtacgatgtggaggcatatctctctaccctgcatatggtagaggaaatgcgggcggaatgcttcgtcccttcccatgcgcaggcaacagaagacatcgccccgcttgcgcggctgaacatccgcaaaacagaagaggcgctggagcaaattacagagctttgcagaacaccgatgatatttgaggatattttaaagggattgttcgacatgttcggcctgacgctcgatttcagccagtatgcgctcgttggcagcacagtacgctcgtaccttgcttatttaagcgaaaaagggcgtgttgacgcagtatttgacaataaccgcctgctgtggaaagcggtataatatccaacaacaagccacgcccggtttcttaatgaagccgggcgtggttttatttccatcaggcatggaacgtattggtgcagaacggacgccccgcggggtcaaacaatgtgcgtgagtcatcaaagaacttttcctccgcgagccgtgcgccgcaggtaatggcatacttggctgcttcatccaaatcgtcggctattaaatcaaagtccagcatccgccccagcttaccggcctgccaaggccagacaggcggcacctatgtatccgtctcctgaaacgccagtgccctgccgccgggcgaaatgaccgccgccgtcccgttttgcgccgggtgcgtcagctcccggcccagaagccggctgcagaaccgcgataattcccggcctgaccggtaacgcagtccatcacgattggccccatatttatggatgggcgtttttgtccgctcatttattaacaccttaatgttatcccgccgttacaggagctgctgcccgttgataacgagacggaactttaaatcaagccgctgcgcagccttgcggcataaaatcatacggccgagaaaaatttcgaagtaatccatgacggaacaaacctctgtatcgatggaaaggcaaagctccacgaccgtatgctcctcattgatgctcaggcgtgacttcacgacagaataattcaccctgtcgtggatgtcaaaggtcgtaatatcgttgttgcgcacgcgggaacggcgcacgtcgctcttatcggccagaatcagcgccgccgctatcgggttgaccggataagccgtcccctcgtcgtggttgccgattgccgtaatgatggtcgcgatatcctgcgggcttgcatccatgttgtcgaggatgcgaaacgccatcaccgccccgctctgtgcgtggtcgacgcggttgacgatattgccaatatcgtgcagatagcccgctatttgggcaagctccgcttcccgctgcgtgtaccccatcgtaagcagtatatatttcgctgtctgcgacacctttgttacgtgcgcatagctgtgttccgtgtatccgagcgcaatcagagactcgtcggctttctctatataggttcggattgtcgggctgttctttacatcctcaaaggttatcaaatcgtttcatctcccagggctctgtccttccagtaccaccacttgagcttttccatatccggctgcggcgtctgcgcaaaatacacggcgcagcggtaaacgtaaagcacgcagctgtcaagcggcccgcctgaacggatacggtcgcgctcatacatatcaagcgggttttctccctttaagtcttccacgcatgtatagccaagcgcaagcaggtgctctttcatattctgcccgacgccggggatttttaaaaggtccgttttgttattctctcctgtttttcccgttttatcgcccatatgtgtttctccatttcaagcgcgattacgccctccgcctggcaggctgctttctgcgcgtgcgttttttcatcatttttaatatctcgtccaccgctttgaggacgaaaatgcaaagacaagcttccagcatggctgtcccctccttttgttttatcatactgttcctgctgtacgataaaaaggtctcgcggggggacccggaggcttatttgtctttatattgcttcatgaccttctttgcgtgctttttaaactgcttgacgacgcccggcggggataaaatctgtacgtcttcccccagcccgaacacccacgcgaaaaactgcgggcttgccatgaccttcacgctgatggtaaagccgtcgtttccgtcctgggaaaggaacacgtccttcccgaaccggtcaaccaccacgccgataagattattatggaagcgaagctttacctcttcctcatcaccgccgtacatgccgaacgtcattttgctgtactgcgccatgtcgaatttctggaacacacgctgcccatcgcgcttttcatccgtcagctcaatagactgcattttatccacccggtaatgcttgatttttttgctctcggagtcgtagcctatcatatagtagttttcatcgtcccaggtaagcgcccatggactgattgcatagcgttccccgccgcgcttcgggcgtttttttatgcgctccttcgtcgtaaacgaaaccgcccattcaaaatacaggaagcttacctttacaccttgggaaattgcgttgtggattttgtctacattgtaatagatgctttcgttcatcgtcttgacacggttttgaacaaatacctgcctttgcagctgccgcgcctgatgtacgcttgcgaggccttctacctttttaatcaactcgttcgacttcttgtgcgtaataaattttgacgactgtaccgcgtctaccaggagctttagctccggcagctcgaaggagcggtttgcaatgtaatactcgtagttcttttcctttcgcatctcgacgtcaacgccgtatacgcgcagcgcctccaaatcgtcgtatatgcttttgcgctcggctgtaatgccatagcccgacaaggcttccaatatctgcgcgagtgttattgcgtgttcgtcgtctgtacgctcctgcagaattttgagcagatacagcagctttaatttctggttcggatttctcggcatactctctcccccttatttcctgttaaaatcgacgcccgctttcctggcctgggcgtgctggtattttcttgctatctgataacgcctgccgcccttaacaaagtttaagcccgtttgcttaaaccggaacgaaacgttcttttttacacactgaccccgcagctttaaaatccagtcaaaatcacaaacgcgggcgttcgcgcctgattcgccgcccgctatgacactctcgcaccattttccaagatgcggggataaatcgatttcttccaaaagcggctcacatacgattgatttatgcttaatcggcagcttcttaaaaattggaatccggaaatccgccatattctggttttccgccgtacagcaaaccgccacattatcgtacccctgcccccaatccggcggaagccctacaaaaaacctatcgatacgtttggtgataaacaggaaagaaaggtcgctgcgttctttcatcatatcccatgccgcgcggcgccatgcgtcggcttcctcaataaaaaagtcagaggtaaagcaggtaaaaaccgttttatccgttttcagccggtattccccgtttttaagcctttggataggaaggtcgaaatccttcgtctttaaaactacggaactgtcctttccatagctgctgtcgcgcctgtatacataacaatttttgcagccgtcacttagcttatggcagccgtgccatgggttccagccctcgtccattttttcttcccctttttcctgccgcctgtgttggttctccggtcttttctgtcttatttataccatacgccgcaaagcgcgtcaactttccgctgtaagttttcagttagaagcatttaaacgccctgtggacggccgcgcggccttgaatttttatacaacaattatccgggtgcatttccgggtttttctcattttaagcgcaaagctgcctttgtaattatgtgtttttgaaatttttttcaggaaacagttgaaaaacacaaaatgtaggtatataatagagctactcacccaagatatagttgttatgaccagcgcgaacggcgcttttaaccgtgcgcaccgtaaaatcagaaaggagaaagatatattatggtagaagtaaatgtaacaggcggggaaatgacccagcaggaaatcgattattatgtagagcacagccagaaaaaatatcccgacagaaaaatccaaaagctcgacatcaagctcgacggggagtatgttgaccttaactgcacgtttgaggaaatcccgtttgagcgtatccgccgtattacgggctatctcgtcggaacgctcgaccgcttcaacgacgcaaaatatgccgaggttcaagaccgcgtcacccacagtatttgttgtgatatctgattaataaccttccggtttgcgcttaaaaactgttacagaaacagaaaaattgcgatgagaccgccatttatttgacacggcgcgaaaaccgtaatataatgaacgctgtggtaaatatcactttagaaggttaatcatgcaatttttatattctgaaagaaggtaatggaatggcacaggcaaaaaaagcaactactgcgaaggcggcggacaccaaagcagcggaaactaaggctgtggcaaaagcggctccggcaaaagctgaacctgtaaaggccgccccggcggtaaaggaagcggttaaggcaccggcaaaagctgaagcaccgaaggctgctgcaaaaacagccgccccggcaaaggcagctgccgcacccaaggctgctgaaaagaagacagcggcgaaagcacctgccgctaaggctgccgcaaaaaaggcgccggcgaaaaaggcaaaggaagcaaaggtttccatgtttttcgagtttaacggtgtgaaggttccggccgaggaaattattgaaaacgtaaaggcaacctacaaggcagagggcggcacgaaggaaatcgaaacgctcgaaatctatgtaaagcccgaagagaacgccgcttactatgttgtcaacggcgaacttgaaggcaaaaagatggacgtatacttctgctgattggcattgcttttttaaacgtaagaatgaaaggacggcttgtgccgtcctttttttatttgtaactcagttttttattgcctcaaagcgaaaaaaaggcaatggaagtttttatagggctgcccaaaaccgcatgaagcctaaggttttcgcgtgttggggctgggctttgaaatatgtcccatggtgcggatttttcttcccgccaaaggaagcgttctactgaaatagcccttaatttgagagacatttcagcaggctgtagggcttgaagaaattgtgcgtctatttcgttaacattatgtgctggcttttcttaacgtcatttaggtatgctatatactcattcccccattcttcaagaacggagagaactttcctgaatttttcaccgatttcacttagctgatactcaactttaggaggaacctgctgatattcaatgcgaacaatcagcccttcatcttcaagcgtttttaattgccttgataaagtggtatgtgtcatttcttccggcatacgtctttgcaactcattaaaacgtattggcccgtcagttaatagatataggatatacatagaccattttccggtaagtaccttttgcgccgttacataagggcatagcccaaacaattctttttttgccatgtaaacgttcctttctgatactagtatcatcaaatatcgtacttgtattatttctcctgcgctatataattatacttgcaaacagaaagaattgcaacccacaatctgaaaggagttttatcatgaatgaagttttggagtatttgaagtcatgcggcactttttatcttgctacaagcgaggatgggcaggctcacgtacgtcccttcggtgcggtctgtgaatttgagggcaaactctattttgttacaaacaaccagaaaaaggtgtaccaacagatgaagaaaaacgggaaagttgaaatttgtggaatgcataagggtacatggattcgtgttgagggtgaagtgaaagaggacacgcgccgggaagcaagggtgtccatgatgcatgacaacgaggctgctttaggtagtatgtacactgtcgacgataatctgatgaccgtattttattatgaacatggtactgctaccatcttttcattcacctctgatccgaaggtaattgaactgtaatcaaataataaatagcgacgccggacaaggcattttagcctcgtccggcgttattcaacgattattgaggtaagtagtaccgccccaattagggataaaacaggaatagccgagcaaatccacaagagcgtttatatctcttccaccgtattataggtccctcaacttttgatttatctagtacaccttctttgctaaggaaaacaaacatacccctgacttttccattgtaatatcagtgtgcaaaatatcaaacagctcattttgtgccaaagctttatataactgttcacaatcttttttgtccgtctgggcaccaatcgggcactattttgccactttacatataggctcattttacaagaaatccagcaattatgcgtttttcagctgataggggccgcaaccggctgaaaaagcaactattttttatgataaacattctctagccggcctccatatcaatccagacgccgctgatattgttgttatgtacgaggccctcatttgtggtttcccttaaataccatcaatgggagcgaagcagcgtttccgtttttgtaaggaccggatagaatctacgcaatacggtaagaaaaaagtataattccccgtgaaagaatcagacaaccagcagggagcagacggtggcagccgcctgctccctgctgcattgtaacgcacaattattgaatcaggccgtaataggccagaataccgttgtaaataccgcgcgcaaagctctgcgggtcgttcctcagcaggaaaacatcccactcgttggtgagaaagcccatctcgatgagcaccgagggcatgacggttgcgcgcaggacataaaggctgggccgcacgaacacgcccctgttctgtaaacccgtgctgtagctaagccacctgcaaatgcttgcccccattacaaagccttcactttcttggctgaaagcatatgcctcgcagccgctcgcagaggtaattgtgctggaattgcagtgcaggctgataaagaaatccgcatcccacgcgtttgccatattgacgcgctcctgcaaggaggttacattgctcgtaccgagctgttcggtcggcgtattgcgggaaagacgcacgtcgaagttcggattggcctgcagcaggtcgcgcaggcgtacgcctatatcataggtaatgtcctgttctctcacgccgtttgcctccgcgcctgcgttggggttctgcgggttgtgtccctggtcaataaaaattttaatcgctattttttacacctccttcattttacactaccattttatgcgcaaagcgtgcggaggtttctttttacaaaaaattgcttgccggcaccggtaaaaccgctataaggaaaagccgcgcttaaagcgcggcttttaaaataaggattatctcggttttaaaatgataagtgaatcatcagccggggatgatgaaagaagggtcgaaatcatatgtgccatagccataatggccctggctgtccctgatattcatatcgcagtaaaagccctttccgtcggaagccgccgatacggggatatcctgtgtctgcgtttggtttccgttgttgaaaatgatattgtcatactgcgccaggttgattacaactttataaatggtctcattaaattcgttcttaccgactgccgtcatttcctgtcctggccaggaaccgttctgctggccgtccgagctgctccacgcatataggaaaaccttatcccaattagcggcgttggagaaatagagcgtaaccgtgttcccgacgggcgggtcggtaggctttgtgtcgggctccgtcggctgtgtgacggtgggaggctcggttgggtctgtttcaggggcagtgggctttgtatccgggttggtcgggtctgtgccgatggtgaagattttgccaatctcatcattagacgacatatttgccaaatatttttgtatttccaggacatccgccaaatcgaccttgccgctgcggtcaacgtccgccgcgatttgctcggcagaggtcataacgagctttgcggcaagatggttctgcatacgcaggacatcggaaaggtttaccagcttgtcgccgttcgcgtcgcccagcatatacgttacgattgtggggtctgtcggttttgtatcgggatcagtgggtttggtgtccgggtccgtcggctttgtgtccggatcggtcggtttttccggctcgtaatccatccaatcaccgttttgatacagcttggaggaaccgccgatttcaaggccgggctggtcctgcgccggtatctgcggaccggaagggccggcgttgaagagcaccttgccgttttgcaggttttccggaacctcgtatacatacagcccgctgctgtccttcgtcatttggacgccaggccatgcggcgtttttgatttcctgggagccgctgtcgtcgtatacatagcagttgacggtactccagttcgttgcgctgttgtcaaagtaaatataggtaccggccgccgggtccttctttgtgaaggtataggacgcctctgtcgtctgtttgccgtcggtcgccgtcagcttaacgataatcggcgtgttgtaagcaacgccggaaccgattgtaatatttgtgtctttcgtatatgtagtcttcgttccgttgttaatctgataagtaccggaggtcgcgtttgtcaggccgagcgttaaagaaagggtatcgctcgtaaaagtgccgccctgcctggagatggtgtttgcgggctctgtgaccgtcaccgcgttatagacaaccgcaatgccgtcgctgccgaccgtaccgctgatggttccgttcgacacggtaaacttattgccggtcacctggtcggtatatgtgccattctgcattttgcgcgcgggtacgctgaccgagccgccgccgcccagcttggcgatgacaacgcccgaggtgccgcgctcgttataggcaacgtcgccgctgcttgagatatattcgccctgtccgttgaaatagttcttaaatttattgacttcggccaccgatttgtctttccatgtggtatcggtagacgcctggcccatctttgcgctgccagggcgagcaaagaagagcgaagcaatgccgccgcgcgagcctgtaatggcccatgcctttttaatcacggcatccgaaacgccgcttgtgttgccaatgcctgcggaaccggaatcgcccatgtaggtgtcgtgcgattcaacccacagcactgttttattcgcggccgcgcccttgctcaggctggaatccgcaaggctctgcgcgttgccgttttgtgccgctacaagcttcgcgtcgccggaatagttgtcggtaatgctgatatactgcgtatagttggaaatagcggtaccggctccgttgagaatttcgccatagtagaaaatttccctgccgcctgcatggctctttgagccattgatgaccgtcggccagaagctgcttccgcagccggaatcgttcggaagctctatgtgctttgcagcgtcgaaacggaaaccgtccgcgccgaggtcgatacaggtgttaagcagccctaaaaccttctgctgtatgtatgagttgccggtattgaggtcgggcatcccgatagagccctgtgtcattttccaacggttgttgtcatcgttggcccactcggaattgatgtgccaatagctgctgttgttgcgcaggtcgctgggcacctgagtggaaatatcgctcatactgttgccggtgccgttgatattgcccaaatggtttgcgacgatgtcgacaataatcttgataccatactggtctgccgcgtcacacatcgccttaaaatcggactttgtgccgagccatgtgctgccgtcggcaaagtcgagcgtgacgggctggtaaagcttccaccactggccctttacgtcggcccagccggcgttaaagtccttcggcttttgtacaggggatacctgtacgctcgaatagcccgcctgcgcgattgcctgcaggttcgacttgaccgcgctatacgaccagttgaacgcatgcagaatcgccccgtcctgcgctttttctacaaggccgtaatccgcggcggcagtactgcctgtttcatccgccgcagcgtttaccgtcgcagcggggacgatgaccatggaaatggcgatgcagagagtaaggattagactccatgctttcttattcagttgtctcataaaaaacattcctcccattatttcaagataaatccttatgttaagaataccaccgactgtaaccgttttcaattgatacttgcaacaaagttgccttcatttattgtgaaactttaacatattttcaggtaagacaagcattattttgaaaatacaaatttcgcctgcgcacttacagaaaacaagctgatagggcctggctcccgctgcggcggcggttcattttttctggtatattgggaacgcgcgctgaaatataaattgatatttaaaaaagcgtatggtacaataaaacaaattaggaagggacagggataaaccgcatgaagaagaggggtttggcgatttttttgatatgctgcgcgctaagtttcatacttgcggccgggctgtccggcggagccggcgcgctgatgtttaaaccgctcgacgtaggcaattataatgactacggcggtggcggcggttatgatggcggttatgacggcggcggctatgactatggcggaaacaacgattacggaggaggcggattcctttactttggcgacggcggcggctcctcgggcggttccagcggcggcggctttgcaatagcggcctttctattcgttgtgattgtctgtgcgtttatcatgattggcaagcgcaagggcggtaccttcggcacgagggctataaacgcggcaaagcccgttgtacagaaccacgagcctgaaattatacctgctatcacgcaaattgacccggatttcagcctcgatgggttcacaggatgggccaaggaggttttcatcaccctgcaaaacgcatggactgcgcgcgactggtcgctgatcaggccgtttgaaaaggaggagctgtaccggcagcacgagctgcagctgcaggagtatataacccttaaacgtatcaatatcattgaacggattaacatccgcgaagctttccttcataaatatgtgcgcgacagccaatttgaatatttgacggtatatatgtcggtacgcatggtggattatattattgacgaggaatcgaagaaggtgctcaagggcaatccgaacgccgactgctatatggattacctgctgacctttatgcggaaaacgggcgtcaagacgaaggccgccggcagcgcggcacagtcgaagtcctgcccgcactgcggcgcgccgctccaaattacgagcgcgggcaagtgtgaatattgcaatagtattgtcacgacgggtgagttcagctgggtgcttgccgatatggacgcggtgaagccaggaatccaaatcgacaattccggcgtactgattcacgacgataccgataacggtaaagattcaggcaacgtaagccactgatagcggaagacgcatttgacgcaaaccgtcagatgcgttttccagccctatggggttaacaaacgaaagccgcccgcgcgggcgggccgcaggcacgccaaacaccgcgctttgcgcggaaacgcccgtcttgcggcgggcggcgcgggcggcggatataaaagaaaaagttggtgtctaaaatgaaagtaaaggataaattcaggcaggataaaacagttttttcgtttgaggtattcccgccgaaaaaaacaagcccgatcgaaacggtttacagtacgctggagcaattaagggagctgcatcccgattttatcagcgtaacgtacggcgcgggcggcaagggcggcgcgcagacaaacggtgaaatcgcgtcttatatcaaaaacaggctaggaattgaagcagtggcacatctgacctgcctgaacaacacgaaggaacaaatcagggaggtcctacgggactttaaagaacacggcattgaaaatattttggccctgcgcggcgacaaaaaccctgattttgaaccgaaaacggattttaagcatgcaagcgatttaattgcgtttatcaaggaagattgcggagaaggttttgggatatccggcgcatgctatcctgaagtgcatatggaagcggcgggagaggtggaagatatcctgaacctgcgtaaaaagattgacgcgggcgcgcagcatatcatcacgcagctgttttttgacaatgcctgcttttaccggttccgcgagcgctgccagattgccgggattgcagtgccgattgaggccggcattatgccggtaaccaacaaaaaacagattgagcggatggtttccatcagcggcgcaagcctgccggtaaagtttacgaagatgatgcagcgctatggagacaatccggaggcaatccgcgacgccggtatcgcatatgcggttgaccagattgtggatttgattgcaaacggtgcagacggtgttcacttgtatacgatgaacaacccgtatgtggccagaaaaataagtgaaagcattaaaaccctgctttgacgcgggacagtcaggggaaattaccattgattaaactggaacaattgaaccgggcggaggcgctgcgctatcttggaatgggcggccagacgccggatgagcggacgctgcggcttttggaggaatccgagcttctgctgctcgatgcggcccggccttcctatattacgcgatgcttacctataagcccgcgggaagacggtatcggctttgagggctgtgaactctgcctgcgcggcggggacattaaaaagcatttagaacattgtgaaaaggccgtactgctttgtgcgaccataggcgcgggtatagacaggctgattcggcgtatgcaggtggaggacatggcgaaggccattgtgctcgacagtcttgcaagcgttgcaatcgaacaggtctgcgataagctggaagggcaaatctctgcggatttccccagctttcataaaacgtggcgttttagcccgggctatggcgatttgccaattggtgtacagggagatttactttcggtactcgacgcgccgcgcaaagcgggcgtttgcctgagctccggaggaatgctgacacccgttaaatcggtgacggccgttatcggcctgtcgcaaaataaaatagaaagaaaaaagcgcagctgcggcgattgcagcctgcgggacacctgcgctttcagaaaggctgggacgcgttgtgtttaaggaattactggaacaagacggcttcattttgcttgacggcgctatgggcaccatgctccaggcaagagggcttcacgcaggagaggcgccggagcttttgagccttacccatccggatatgatacaggaaatccaccgctgctatatcgacgcgggcgcgcgggcggtgtacacaaacacatttggcgcgaaccgctataagctcgcggggacaggcgaaagcgtagaaacggtcatctccgccgccgtagcgaacgcgaagaaagcctgtgaagggacaggaacgctcgttgcgctcgatatcgggcccatcggccagctgctggagccaaacggcgcgcttacctttgaagaggcctatgatattttcaagcagcaggttatcgcgggaaaaggcgcagacctgattgtatttgaaacaatgaccgacctatatgagctcaaggcggcggtgctcgcggcgcaggaaaacagcgcgcttcccatcctttgcacgatgacgttcgagcaaaacaggcgtacctttaccggctgtacggtatccgctatggcgcttacgctcgaggggctcggtgtagacgctgtcggcgtgaactgttcgctcggcccggacgagctataccccgtggtggaggagctttccagatggacaagccttccgattatcgtcaaacccaacgccggccttcccgacccggagacgaacgcctatgacgtaacgccgcaggattttgcaaaaagcatggagcggctgctgccgctgggtgtgaaggtagtgggcggctgctgcggtacgacgccagaatacatcaaagcggtgcgctccgttttggagcgccaccaatacaaaaagcgcaaggctgttgttccgaacgccgtttgcagcgcggttcataccgtcgagactggctgtccgcgcattgtgggagaacgaattaaccccacaggaaaaaagctgtttaaggatgcgctgaaaaacaacgacctggattatatcctggcacagggaatcgagcaggtgcgcgcgggcgcagacatcctcgacgtcaacgtcggcctgcctgagattgacgaggcggccatgatggtcaaggtgataaaggagctgcagggcgtgacggatgccccgctgcaaatcgattctacccggccggacgtacttgaggcggcgctgcgcgtatattgcggcaagccggtcgtaaactccgtaaacggggaagaaaaatcgcttagcaacgttctgccgctcgtcaaacggtacggagcggcagtcgtcggtctgacgcttgacgaaaacggcattcccaaaacagcccagggccgctttgcaatcgcggaaaaaatcgtccggcgcgctgacgcccttggtatcccgcgcggcgacatttttatcgattgcctgacgctcacggcctccgctgagcaggagggcgtaatggaaacgctttcggcgctcaggcgcgtaaaggaagagctgggcgtcaaaaccattcttggcgtatccaacatctcgttcggcctgccaaaccgtgagcttatcaacgcctcatttctgacgatggcgctgcaaaacgggcttgaccttgcgattatcaaccccaatatcgaggccatgaccggcgctgtacgcgcttataagctgctcgcgaacatcgacgaaaacgcgcgggaattcattgccgcgtatcaggatattaaaaaggcacagccctcccctgccgacacgcagatggatttgccctacgcgattgaaaacgggctgaagggcgactgcgcgcggctgacgcagcagctgttgctgacgacagagccgatggaaatcgtaaataaaatattgattccagcgcttgacaggactggcgcacagtttgagcaggggaagatttttctgccgcagcttatccagtccgcgactgcggcgcaaagctgctttgaggtaattaaaaagacgctttcttcaaagggaaacgcgccggtgagcaagggtaaaatcgtgctggcgaccgtcaagggcgatattcatgatattggaaaaaatattgtcaaggtacttcttgagaattacgggtataccgtcattgacctcgggcgcgacgtcgacccgcagcttgtactccatgcggtacaggagcacaaggtaaagcttgtggggctttcggcactgatgacaacgacgctcggcgcgatggaggacaccatacgcctgctgcgcgactcaggagaaacgtgcagggtgatggttggcggcgcagtgctcacgccggaatacgcagaacgtattggcgcggacttctattgcagggacgcaaaggaaagtgtagacacggccaaaaaggttttgggataaaaaaacgcccgcagtgcgcgggcgtttttctatattaacgcgttttttagttttcttgattaaaactttccaattatcttaaatggttataataaggaagaagtatgcacagaacgggtagctactaagggaaatctcaatgatactatgaatgcaactgacagttgacacattgaatggtgctgattggtagtaagcaatctgaaaaaaagatataatctacgcattccaatcacacaaggagaatatagtaatgatttttgcagacaaactgatacaacttcgcaaaaaagcaggttggtcacaagaagaattagctgaacaaatgaatgtaacaaggcaatccgtttcaaaatgggaaggagcgcaatcagttccagaccttaagaaaataattcgcctttcagagttgtttggcgtaagtacagactatttgcttaaagatgaaatcgaagatacagaatgtaacatccagtctgatgatttgtctacactaagacgtgtatctatggaagaagcaaatgcttttctttctgtaaaagctacaacatcaaaaacgatagcatttgcaacttttttatgtattttgtcacctatatgtctattaatattaggcgcgattagcgaaactccagaatatggcttagcagataatgtagctggaggaattggaatgattgttttactgctttttgttacaatagcagttgctttgtttatttcaagtggcagaaaaacagcagtatatgactttttagaaaaagaaatatttgaaacagagtatggagttagcggaatggttttaaggcggaaagaaaaatatagcaaaatatatacaaaaaacaatataatcggagctggcctttgcattatggcactaatccctcttttgggaggagcgatttttaatgatgaaaatgttttgctactgacgattatgctttctgcttcttttgttcttgcaggtattggcgtaattttttttattagcagcggtattatatgggcaagttatgaaaaacttatacaagagggcgattattcaaaggaaaaaaagagaaattaatctattacagctattatcttgggttcaaatttgttaattgctaccgcaatatacttgggatatagcttttctacaaataattggagatattgttgggttatttggtcgttgcaggcgtggtatttccttctgtatacaaagaaagaggaaaaccacttcgctggttttcctcttttcaaacttctccgaaccaaatcatgaggttttatcggtttgacgaacgaaggcccgcctgcgcgcggggtactttgcgggtacagcaccttatctctttctgcaaaggcttttttgcctgaaagcgaaaaaaagtttaaaaggctatgtaagcatttatagaatatcccgcgaacctgctgaaatcgagccttgcgcgtatgccttaaaaagccccgtctcgctttgcaaaacgcgtttgtatctgtggagcgtttggcaagacagcgtaagcggcccttgccggggattagtggaggccctcaacaagcagattttaccggttttcgcgcaggcgaaaaagtggaaaatctcagagtgtgtaccactatgccctgtttgccgctattgaattgctaatgttaacagctacgcatcaattcaatcaggcgtagtccaatcagcccgaaaaccggaattttgagtttgaactgtaccccaaaaagcagagcagttttatactttgttccgtgtcaagaaaactccaacgattgccccaatcaggataatcggcgctaacctgacaaacagccattcaaatgcgtgaaaagccgctccggcaacagcagtttcagggtcgctataattccaactcaagtaaggactatttaatgctattaagaccgcagaaattattactatgaccgcacacaatgagataagcagccaatgaaacgtttttcgtctcgtggtcttcctttgtgcgagctgtaagtttataatctccagtttttccgaaatcacttttaagtcatcagccttcgactcaacaacagtttctccaagcaaagtgcttaccggtgtttcaagcacctccgatatggagagcagcatatcagaatcaggaactgacaatccctgctcccatttagagattgtttgtcgtaccacattcagcttgatagcaagctcttcttgcgaaagtccttttgattttctgattgctttcatgttttcgtttaacattagggacgccctcttttccttcagtcgttgacattattgtatgaggaactgcccgttgctacaagcaacgcatattaacattcacgttttatggccgtggtatgctgctatgttggctggagaggaaaatctaaagcatgataaattgttcttggcaacatctatttatccaataaaaagacaattccgatttgtcgaatcgtcttattcgcccaaggtgtttaaccatctctaaagccaaatcgtataaaggtcaatttcccgacgtcatagatgaggccccgtacacattcttataagctcttatattcctttagaaagcttgggcggcaaacgcgcctatttttatataggcgcgtttggtccccccagttaaccggctggaaaataactgtttttataaaattacaaatcagggcacttttttctaaaaaatctgtctcctggctttcctcaaggtataaaggatagtacaaacagcatgtttccaagaaataaaactgttttttcacttagaggcaatcgtcccgccgcctacaacgacgtcgccgtcgtaaaaaacaacagcctggccgggtgtaatggcgcgctgcttttcttcaaattcaatgagcgcctgcgtttcggaaagcggatgcacgaccgcttttgcctcacgctggctgtaccgcgccttggcggttacactcagggaagtgacgggactgccgcacgcaatccagttcaaatcctccgcaaccagccggtctgaaaataaatcctcattttccccaagcgtaacgacattggtttcagggtccttgcccagcacgaaaaccgggtgcctatagctgatgcccaggcccttgcgctgcccgatggtataatggataatccccttgtggcggccaaggctcgagccgtccttataaataaattccccctctttagagggtacgccccaaacggtttccagaaaaccggcgtaatcgccgtccttcacaaagcaaatatcctggctgtctggctttctggcattgacaagccccttctcctgcgcgatttcacgcgcctgccccttcgtcatgccgccgagcgggaagagcgtatgcgcaagctcgtcctgtgtgagtacataaagcacataggtctggtcttttgaggaatcggcggcctttttcagcaggtaacggccgctgcccctgtcgtactcccgccggacgtaatggcccgtcgcaatcatgccgcgctccataagccttgcgcgctccaaaagcttaccaaactttatatagcggttacagtcaatgcaggggtttggcgtaagccctttttcgtaagcccttgcgaacctgtcgataacctcccgtttaaaggtcaatccaaaattgaacacataatgctctatgccaagcttatatgcgacgttcctcgcgtcctccacatcgtccagcgagcagcacgtgcgcgtgctgtcgtttattccgatgtcgccgttatcgaacagccgcagagtcgcgccgcagacctcatagccctgctccaataaaagtgccgctgccacggagctgtcaacgccgccgctcatggcgaccattaccttttccttcatatcgattcaccgccggagtataattaatcgtttgttttgctgcatggaagccgtgcaagccgaagttatcacctgtctgcctgattgcacaggtgaagggcctattccccataggctttcaagcacctttagacgtaccatgctttaatgggcggccgtttacacagcctattgccaatctttttattcttgatatcacacaataaatcgggtttgtcctctgaaataaacacgccagagctggtggcagggctgcagctccccaaaaaccgctgcctgccgtattccaaaacctcgattcgtttatgcgatgtgtttatatccagttttacggcagcctaagctgccggctcattcccgccaattacacgtttatagcgcatgaattcgttaccctgtattcacgggaaccgcgcaattatttataacagcgcaagctgtccgctttcgaagaccgctttcatttggcataggcaaaagggatgccctgcggggtcaagcatgaccttccagtcatcagaaaattgctcgtctgcgactgtcgccccacaatcggatgcatattggactgcttcctccaggttattaacagcaaggtccaaatgcgccatctgctgttgagccccaggctctggcggccacacaggcggcttatactccgggttccgttgaaacataataccggggtacgctccctggccggttcccggggcgccgacacatgcccaatcttcattataaaacggtatttcccacttgagcagctccgcatagaactttgctaattcataagggttgacgcaatccaccgtaaatgtgtacattttaattttcagctcatcttccattacacaaaacctcctgattttttcatgtccgctgtttaccttctgagaggcatatatttctgtaagctaaatcaataaaaaacaggcgggcggaaaactgccgcccgcgcctttgccagcatatcatattttgtgtgtttggacaagacggaaaacaggctcacccgccgagctctatcatcttttcgatacagcacgccgctttctcccgaacctccgggtcaagctctatgatatccccgccggtgccttttatacaattgaatacgtctacaatcgtcgtggccttcatattcgggcaaatcaggcgctttgacatcaggtagaacgatttatcggggcattcatgctgtaaatgttcggcaatgctgatttccgtaccgataatgaactcttttttatccgattgcttggcataattcatgatagcggaggtagaaccgataaaatcggcttccctgagcactgccggaacgcattcaggatggaccagaagctgcgcgccggggtgcaggcgtttgctttcctgcgcctcgcggaaggatacctgcgcgtgtaccgggcagctcccgtccatgagcacgatatttttttccgggaattgttcctttacatattgcccgaggttctggtcgggcaggaaaagaatgttgtcgttatcgatattcccgacgattttaaccgccgaggacgaggttacgcacacgtcacactgcgttttgagcgcggtggtcgtattgatataagcaacaaccgtgtaacccggatgctcctttttaaacgcggcgacctcctgcggcaaaatctgttctgccataggacacccggcgtcagggtttgacagtatcacccttttctgcggcgacaagagctttaccgtctccgccataaagcgcacgccgcacatcaaaacggtcgattgcggcgcgctctttgccataacgctcagctggtaggaatcgcctgtaaaatccgcgatttccagaatgtcgtgggactggtagctatgcgccaaaatacagatatccttttccttcttgagccttaaaatctcatcctgtatatcccttaccatatttgttaaccctttcaggccgggcacgcccgcacggcgtacccggccaaaaattcaattatattattcagccattgtcttgacgagcacagccttttgcgcgtgcaggcggttctccgcttcctcaaagatttcgtccgcgtgcgcttcaaaaaccttttccgttatctcctcttccctatgcgcggggaggcagtgctgcaccatcgcgtcaggctttgccgctgccatgagctcgtcatttatctggaagcccgcaaacgccgccgcgcgctttttcgcctcgttttcctgtcccatggacgcccacacatcggtaatgagcacgtccgcgtcctttgccgcgccaattggattcctgtgcagctcaaagcaatcgtaggccgccgcaaattccaggatagacgggtcggggtcgtacccctccgggcacgcgaccgatactttcatacccgtcttaagcccgccgacaatcagggagttcatcatattgttgccatccccgataaagcacagcttcagcccctcgagcttacccttaaattcacggattgtcatcaggtcggcaagcacctggcacggatggcagaaatcggtcagtccgttgataatagggatactgccatgctgtgcgagcgcctcaacctctgcctgctcaaacgtgcggatcatgataccatcgagaaaacgcgacaatacacgcgcggtgtcctgcaccggctcgcccctgcctatctgcatgtcgtttgccgacaaaaacagcggcatgccgccgagctggtacatgccgacctcaaatgaaacgcgcgtgcgcgtcgaggccttctggaatatcatcccgagcgttttgccctttagcagcttgtgctctatgccgtgcttctgctcgtatttgagctggtcggcaaggtttaaaatgtcgataatttcctggcctgataaatccaggagcttgagtaaatgcttcatgcttggttcttcctttcaatggccgtattttattatgctttcaggcaatgctgcaaaattgcaagccccttgtctatttcctcatatgtaatggtaagcggcggcagcaggcgcagcagcgcctttgctgtcaggattaaaagcccgttttgtacgcatttggcggcgatttcttttgcttcgccgttttcgagcacgataccgagcatcattcccattccgcgcacttcttttacgttgtccatcttcaaaagcttctcttttatgtatgcgcccttttgccgtacctcttttaaaaacgcgtcgtttcctacacgggacagcacttccaaagcgccggcgcatacgatagggtttccgccgtaggtggtgccgtgcgtaccggcggataaaacgccgccgagctctttgctgcacaggcatgcgccgattggcagccccccgcccaagccctttgccgaggttactatgtcgggcataatcccgtaattttcataacagtaaagctttcctgtgcggcccatgcccgtctgtacctcgtcaacaatcagcagcagcgcgttttccctgcaaaaatcatagaggtttaaaacaaactcctgttcaagcgggcagacgccgccttctccctggataagctcaatcattacggcgcacgtttcttcgttcacgcttgctttcacgctctcaaaatcgtttgcctccgcaaacgtaaagccgccggtaaatgggaagaaatagttgtggaacacatcctgaccggtggccgaaagcgtcgtgatagtcctgccgtggaacgaatttttcaggcagacgatgctcgttcgcgacgggtcgaacgtttcaaagctgtattttcttgcaagcttgatggcgcattcgtttgcttccgcgcctgaatttgtaaaaaacaccttgtcaaaccccgtcttctcacagagcgcttttgcaagctgcgtctgcaccgggctgtaataaaggtttgatatatgctgaatctttaaagcctgccctgtaaccgcctttacccagccgtcgtcgctgtagcccagcgcgtttacgccgatgccgcttgtaaagtcgatatattccttttcatccgcgccgtatgccgcagcgcccttgccgtgcgtgagcacagcgtcgaacctgccgtatgtgggcatcaaataatcgtgctcgtcatttttaacctgtgtatagtccatagcttatcacgcctttcctctgttatatggagccgtgctcgcaggagtaaacgtgtacgtccccgcgccgtaaaaatcccatcgacgaccagaacgcctgccccgcctgattatcggaaaacacgaaaatatgcgttttatcgatgccctcccttttgagcccttccagcgcttcctgggccatttgccttgccacgccgtgcctgcggtagccgggcagtacagccatatgatggagaaatccgcgccgcccgtcatgtccggcgagcaccgcgccgatgattttcccgtcctcttgcgcgacgacgctcaaaccctcgttgcgctttaagtaacggcagatttcttcccgcccgtccgatttcgacagcgcgcgctttgaagtcacctgccacatggcgcggacttcattataatcgttttccttcattttcctgatggtcatagggtacctcttttttagtaaaacatcgtgccgatgccctcgtcggagaacatctcgattaaaatggagtgctcaatcctgccgtcgataatatgcgcccgcttgacgccctgccgtacggcctcgacgcagcaatcgattttaggaatcatgccgccgcttatgattttttcccgcttgaggctcgggacgtcgctgacgttgacaacaggaatcagcgtgctttcgtcttccctgtcgcgcagaaggccgcggatgtcggtcatcaggattagcttgcacgcgccgagcttcgccgcgatgctggccgccgcgatatccgcgttgatattgtaaacctcgccatggtacccgcccgcgatggtcgagattatcggcacatagcctttttcaatcgcgtcttcgattacgccggaattgacctctgtgatttcgcctacaaagcccaaatcctcagctgaagccagcttttccgccataatcatgcgggagtcgagcccgcaaaggccaagcgccctgccgccatgcccctcaagctgctggacaagccccttgttgaccttgcccgcgagtaccatctggacgatttcgacagtctcttcgtcggtgacgcgcattccgtttacgaatttgctttccttaccgacctttttgagcatttcgctgatttccggaccgcccccgtggacgagcacaacgttgatgcccacaagctgcatcaggacgatatcgctcatgaccgcgcttttaagctgggggcttatcatcgcgttgccgccgtattttacgacaatcgtctgtcccgcaaatttttgtatgtacggcagcgcctgtatgagcacctgggctcgcttttcgcttgttatatccataatagttcctcccggaatcagattatccattctatcttttacggccgttataaagccatcaattctttccttattttttcatcgaacttttccagcgcatagcggaaagcggttctcggcatttctttatggcgcagggccaggtattctttcacagattccatatctgccgttgataagcatttcagcatccagccatagcccttttgaacaaggtcatgcccgtcatacataagcaaatcgctaatttgatatgggtaaaggccctcataatcgttatgtaaaatcgcggggattagtattacggcagaagcgcgccgtacccaaaaatccttgtccgccgtccaatcggttatttttgcaaacagcgatttatctctttgtaataaagcgccaaacgcgtgcgtacagaaatcgtcacagtcgccccagccccgtacataccttttcagccagctataaaaaacatcatatgtagcttcgttatattggcctcttacccggaacgcccagtcatacgctatcacgcctaacgcccagctttgctgttccagcagctcttcgcagagggccaggacattccctattgttttatcttccagttcccgaaacagcttggcagacaattttctgatatcgcctgtaatgatatgcttcccttgcggaacagcggacgcaagcttttcaatttcctccattgcccggaggattatttcattcatattttctgtctcctataaagtatacacatgacaggtaaaaggcggccgccgcatatctaagctaagtaagggcgcggcagtcccggtatacgccaatttactgaaaagtcggctcaggtgcggtagtcgccgtttattttaacataatcatacgtcaaatcacagccgtaggcctccgcacaggatgaaccgtcgtttaaggatacctcaatggtaatttccttttcgctgagaatctcttttgccttatcctcagaaaattcaattcccgcgccgtttttgcagacgggaagcgttcctttgccggaggcaaacgccacatctactttatggatatcaacgtcacagccgctgtagccgatggcgcacagcaccctgccccagtttgcgtccgcgccgaacatagcggccttgagcaagctcgagcaaatgaccgttttcgcaacgccctttgcgtcctcctttgtctttgcaccggtgacggaacagacgagaagcttcgtcgcgccctcgccgtcccccgcaagcattttggaaagctttttgcacagtgctgtcagcgcctgcacaaaggccctgtaatcttcgttcttttctgtaatttcggcgttgcccgccttgccggacgccataatggtgagcgtatcgtttgtggaggtgtcgccatcgacgcttaccatattataggaatccccggctgcctccttgagcgcttcataaagcatgccggaggaaaccgcggcgtcggtcgtcaggaagctcagcatcgttcccatgttgatatgtatcatgccgctgccctttgcaatgccgccgatggttacggttttaccatccagggtaagcacggcggccgcttcctttttgacggtgtctgtcgtcatgatggcttccgccgcgtcggtaccgccagctttggagagatgggcaaaaagctcatccgctttattttcgattggctcaatcggaagaacctggccgattacccctgtagaagcgacaataacgtcttcgggaacaatctgaagcttttccgccgcaatttcacacatacggtttgctttttccataccgtctgcgttgcaggtgttggcgttgccgctgtttgcgataaccgcctgtgcccttccgttttttaaatgttcctgtgtaacaagaaccgcggagcttttgactaagttttgtgtgtagacgcccgccgcgctgcagggtacgtcgcaggcaagcagcatcaaatcacgcttcgtatggttattcggtttgatggaacagcatatacccgccgccgtaaagccctgcggggttgtgaccgtcccgtctatcagctgataaggcataatatcctcctaaagccgccgcgcgttaaaaagcaggcggcacaatttcgagccctgttttttcgtcgagcccgaacacgatattcatattctgaacggcctgccccgccgcgcccttgaccatgttgtcgatggcggaaacggcgatgagcctgttcgcgcgcgtatcgatatgcagcgaaatatcgcagaagtttgagtatttgatgtcgtggatgtccgcgtacgcgccgtcgggcaaaagccggacaaaatattcatcatggtaaaattcctcgtaggcagccctgattttttctttcgtcgcgccctcgcttaacattgcgtagcaagtggaaagaatgccgcggtttatcggcagcaggtgcggtacaaaggtaatcgtcacattttcgcccgcgagatgggaaagcgtttgctcgatttccggcgtatggcggtgggccgccaccttatatgggtggaacccttcgttcaaatcgggataatgcgtgttctgggacagccccctgcccgcgcccgttacgcctgatttgcagtccgctacaatacctttggcggagataagcccagcgctgattgcgggggcgagcgccagcggcacgcccgtcgtatagcagccggggttcgctattgtttttttgccctttatctggtcgcggaacagctccggcagcgcgtacacggaattcctgtgcagctccttgtccttatactccccgccgtaccattccttatagtcgtcctcgttttccagcctgaagtccgcgccaaggtcgataaagattttttcccgctcgtaacattcctttgcgatgtcctgggaaagcccgtgcgggagcgccgcgaacaccacgtcgcttttatctatcacatcctgcgcggttgtgcaaaccatatcgtttagccggcggtatgcgggataaacggaagaaaccggctttccttcaaaagatacggagctaatcgcggcgatttccgcctgcgggtgctgcatgagcaggcgcacaagctccgcgcccgcgtaacccgtcgcgccgatgattcctgcttttatcataaaaggtctccccttctgttttccttagttactgaataatctgcccagcggcagagcgcgcccgcttccgcgtcctttgctctatcggccagccattattgcaaagccttacgtacctttgcggcctgttcaagcacgtttttggtagcggggccgccgtatgccgcgcgcccgttgacgcacgcctccagcgaaatcgcgtcaaaaacgccctcgtcgaacgtaccgcatacctttttatattcctcaagcggcagcgtttcgagcgtcagccccagttcgatgcactttgcgacgagcgttcccgtcgccttatatgcgtcgcggaacggcaggccctttttaaccaggtagtcggcgcagtcggtcgcgttgataaacccgcccgcggcggcacggcgcatattttccggcagcaccttcatggtgtctagcatcggggtaaaggcagtcaggcacatcctgaccgtgtcaaccgcgtcgaaaatggcctccttgtcctcctgcatatccttgttgtatgcaagcgggatacccttcatgacggtaagcagcgtcatcaaatccccgaatacgcgcccggattttccgcgcacaagctccgcgatgtccgggttctttttttgcggcatgatgctggagcccgtcgaaaacgcgtcgtccagctcaatgaacttgaactcccatgaacaccacatgatgatttcctcggaaaagcgtgacaggtgcaccattacgatggaaagcactcccgccagctccatacagaaatcacggtctgaaacgccgtcgaggctgttcatggtaatatctgaaaaatcaagaagctttgccgttaccgaccggtcaatcggataggtggtgcaggcaagcgctcccgagccgagcggcataacgtccatgcgccccctgcaatcttgaaggcgcgacaaatcgcgcatgagcatctgcgcgtacgccataagatgatggccgaaggtaatcggctgtgcccgctgcaaatgggtataaccgggcataacggttgcggcatactgctccgccttgtcacagatgaccattacaagctccttgagcagggcctcaatgcgtccgcattcgtttttaagcgtcatttttatatcgagcgccacctggtcgttgcggctgcgcgccgtatgcaggcgcttacccgtatctcccaggcgagcggtcagctcgccctcaatgaacgtgtggatatcctcggcctgagggtcgattgcaagcgtgccggactcaatatcctttaaaataccagagagcccttcgcagattttctccgcctcgcttttctcgataatgccgcactggccaagcatggcggcgtgggcgatgctgccttctatgtcctctttatacatgcgctggtcaaacgggatggaggaattgaaatcgtttgtggttttgctgatttccttctgaaaacgccctgtccaaagcttcaatgaaattcacctcataaaatcagtacacggggcggagaaagattcgtccgcccctgtaaatgttgatattttattttctgatggagtaattttgcgccggctgccatccggcgtaaacacaaaatgcggatatgtcaaacgccagcagcaaaataacgtgaaaaaattatttgattaagccctttttcgcccgcaccttaatcggcaggccgaacaggttgataaacccagcggaatcgttctggtcataaacctcatcctcgtcgaaggtcgcaatttcctcatcatagagggaatacggggaggttacgcccgcgtccatgatatttcccttgtaaagctttaattttacgtcgcccgtaacggtttgctgcgtgctgtcgacaaacgcggaaagcgcctcccttaaaggggtgtaccactgcccatagtaaacaagctccgcaaaacgggttgccacggtttccttataatgctgtgtatcgcggtcaaggcagatttcctcaagcttgctgtgcgcggcgtaaaggatagtgccgccgggcgtttcgtacacgcccctggccttcatgccgacgagcctgttctctaccatatcgacaatgccaacgccgtttcttccgccgatttcattaagcgtcttgacaatggaaaccgcgtcgagcttctggccgtttacggcaaccggctcgcctttttcaaacgaaaccgtaacatactccggcttgtcgggcgcctgctccggtgatacgccgagctcgaggaaccccggctcgttatacttcggctcgttcgccgggtcctcaaggtcgagaccctcatgcgaaaggtgccagatgtttttatccttgctgtagtttgtttccctgttgattttcagcggaatacccttctcctccgcgtaggcaatctcttcctccctggatttgaactcccacgtcctccaaggcgcgataatcgtcatatccggagcatacgccttaatagcgagctcaaaacgcacctggtcgttgcccttgcccgtacagccgtggcagatggcgtcggcgccttccttaagcgcgatttcgacaatcctcttcgcgataatcggccttgcaaacgacgtgcccagcaggtacttaccctcatacacggcgcccgccttgagcgtgggccatacgtattcctcaataaattccttgttcaggtcttctatgtaaagctttgacgcgcctgtcttaatcgccttttcctcaaggccgtcaagctcggtaccctgcccgacatcgccggacacggcaatcacctcgcagttgtcataattctccttgagccacgggataataatagacgtgtcgagcccgccggaataagccaatacaaccttttttatcttcttttccataataaattcctccgtatctaaaatataagctgattttctgttaaccgtatggctatcattatacaccccttatgcaaaaaatcaagtcttttatgtataattattcaagataaagcgtttttgtagccctcaacaaaaagacaacgaattgcggcggcggaactatacaaattatgggaaagctttcaattgcgccgctgcctatatttttattccgaccgcataacgtaaagccgccgccaggcggaaaccgcgcccgagtgcatattatgcataattttttgtatattatacacatcggtgctataatcagcataaactgaatcgaccaaaatcatacttggagggactgcaaatgaaaggctttcaggaaatcagctgcagccagctgaaagacaacccctttacgctcatcggcaaggactggatgctcgtcaccgcaggcacggaagaaaaatacaacaccatgaccgcaagctggggcggcgtcggttttttatggaacaaaaacgtcgcgtttacgtttatccgcccacagcgctatacgctcgaatttgtcgaccagaacgaatattacacactttccttttatggggaggaaatgcgtaaggcgctgtccttctgcggctcgaaatccggcagagattacgataaggccagggaaacggggcttgtgcccgtatttgacgaaaaagcgccgtactttgagcaggcgcgcctggtgcttgtctgccgtaagctttataagcaggacttttcacccgcctgctttatcgaccagtcgctcgattccaattataaagataaagactaccacaaaatgttcatcggcgaaatcgtgaaggtgctggttaaaaatggctgacctataccggcggaggaagtgcaaatggaaaaaaccgtactcattacgggcgcgtcgcgcggaatcggcgcaggctgcgcccagctttttgcgaaacacggctacaatatagcggttcactataataaaagtgaaaagcaggcgctgcagataaaggcgcacgcggagtccttcggcgtactcgccgcggcattccaggcggatgtaagcgacagcgcgcaggtaaaccggatggtagcagacgtgcttaaaacgtttgggcgtatcgatatcctcgttaacaacgcgggcattgcgcagcaaaagcttttgccagatattacggatgaagactggcagcatatgctcggtacgaatttaagcggcatgttctactgctgccgtgcggcgcttccccatatgatacgggagcaccggggctcaatcgtcaatattgcgtccatgtggggtatcaccggggcgagctgcgaggtacactattccgcggcaaagggcggcgccgtcacgatgacaaaggcgctggccaaagaggtcgcgcccagcggtatccgcgtcaactgcgtctgccccggtgtaatccaaacagaaatgaacgcgcagctgtccggcgacgctttggatgaactcaaggcagaaacgcccctcggccgccttggcctgcctctcgacgtggcaaaggccgtctgctttctggcggaggacgagtattcttcctttatcaccggccaggtattgagtgtagacggagggtttgccgtttaaaacaaggcgccccagcatatgttaaaaaaacaaggccatccggctttctcagaaccggatggccttgtttttcattctgctaaatgaagtattgcgctgtttatcttctgtatggctgcgaaacatccgtaagccccagaatataatcggtacttaccttataaaacctggccagggaaatcagcatttgtgcgggcgtatcctgttcgccccgttcacagcgggcgtatttatccgcttttacatttataatcgatgcaatttggttataggtaaggcagcgcattttgcgtatttccctcatcctttcataacggttcattttttcgcctcctttccaagccgcccgcggcttctctctgccatttaatttttactgacatttaattttactgaaatataaatgggcagattccctgttattttgagatttccacccctcgattttacaccatttcttttttcatacgtgaatttcacttaaaaagtcataagcgatatccacttaggcgataattgtacaggggtgtcgccatgagattaagaatcagagatttaagagaagaccgcaatctgcagcaaaaagatatcgccaaatacttgaacgttcatcaaacgacgtattcgagctatgaaaacggaaagctgaatttgccgatcagcgcgctcgacaagcttgccgatttctacaatacaagtacggattatttgatgggccgtaccaacaacccggatccgtatgaatagaccttacataacggcagaacaaaacggttatgttctgatttttttactatttcttcttaggaaatgtgcaggcttttctggtataataaggacaaaatagaaatcgggaggttttacacatgccgcagtggttaaacaacgcagttttttacgaaatttatccgcagtccttttatgattccaacggggatggcattggcgacctggcaggaattacctgtaaactggattacgtaaagggccttggatgcaacgccatatggctcaatccctgctatgattccccttttatggacgcaggctacgacgtacgcgattataaaaaggtcgcgccccgctacgggacgaacgaggatttaaccaacctgttccggcaggcgcatgaaaagggaataaaggttatactcgacttggttcccgggcatacatctgacgaacacgcatggttccaaagcagtaaaaaccccaaccaggatatgtataagaaccgatatatctggacagacagcgtatgggaggctccgccccaataccgcctgatgtgcggaatcaccgacagggacggcaattacctggtcaattttttcagctcacagcccgcgctcaattacggatttaaagagattacccatccggcctggcagctgccctgcgaccatcccgactgtcaaaaaacggtcggggatttaaaggatatcatgcgtttctggcttgaccgcggttgtgacggttttcgcgtcgatatggctgactcacttgttaaaaacgatgaggacaagacagcgacctcaaaaatctggcgtgaaatcagggagatgctcgacagggattatccgcaggcagcgcttatctcagagtggtcctgcccacagcgcgcactgaaccttgcggggttccatgcggatttttatcttgaccactacggcaacggctacaataccctgttccgttataccgacagggaaacgggcgaggataaaagctttttctgcaaagacggcaagggcgatatcacgcttttcaccgaggactactgcaaaaaccttacggagacaggcgaacatggatacatcagctttatcacctgcaaccacgacacgccgcgcatgagcaaaacgctcggcgatacggcgcgcaggcttgcctactgtaccatcttcaccttgccgggcgtaccgttcctttattacggggatgaaatcggtatgcggttcatcgagggccttcagagcaaggaaggcgggttttcccgcacggggacaaggacgcccatgcagtggagccgggatgaaaatctcggattttcgacagcgcccgctgaaagcctgtaccttcctgtcgacagcgccccagacgcgcctaccgttgaggagcaggaacaggacgaaaattccatgcttcatacggtaagggaaattatcgcgctcaggcaagcacatgaggacttgcaggcgaacggcccgtttgaagtgctttacgccgaaaagaacgcttacccgttcgtttataaacggggaaggtttgtggctgccgtgaatccatctggaaaagaagtacaggcacccgtcccctgtaacgggaacccagtgtttgcaatcggtagttcacgtctctcagctgatgggattgtgcttgcgccgcaatcgtttgttttggttgaatgcgcaatataaaataatgactggaaaccgccgtcggttgaacggcggtttcttttttatggagctgcccgccctttaacctgttttggtttacaatattgtataaccggcatttttcaacgccagcacagcctggggaaacgcatcttcccggcaaagcaggtagtcggtgttaaaggtcgataccgcaaaaacggcgattccgttttctgccatcacgccgcataatccggctaagattccggtaagtgaaaaatcaagtacgccctgaaccctaagagcgcgccatccgttttcgcgtattatatattgacgtggtacatattcttccgggcagaccaacgatacttcctcgtccgtaacagaaagaaaggtaaacggcttttccaaatccacctggcggacagaatcgagcctgcagacggagaagcgctcctttaatattgcaagtgtcataaaagcctcttttttgttcatttttgaaaagaattttgtctaataataaatcacaattaaattataactgatttttttatggaaaacaatggaattgctcagaaaaaatgtattacaaaaatttaatttttataattcggaaaaagctgttgacaagagaaaaattacagtttgttaactttttaagtgtttttttcatatttgaaaaactgttgaaaagtaagtttttcacattttccttactttttctgttaaatatgggatttcggaggccaattcttcacactttccacatagttttccacattcatgtgaagaaagcgggatttactgattgtataatcgtaaagaatccctggataccgtatcaaaaagcacacctttattttgtttagtttgcctgaacgcggtttttattatttttatatgtgcaggcagcctctgaaaaatgtatttgtacctgtatatattgtaaattccccgccaaaaataaaaatggcggaaggaacgccggatacagctacataaaacaggcaaaggagatttattatgataaagggcatcaacaggcaggtaatcgaaataatggacacggggaacctatactatgagcgcgcgctgcttgtcgtccgtccggaatttgcgggcgcacagcgcgaggtgcttgagcgcgaggcaaaacgcatggtaagccaaatgcgcgcgccgtcggccatcaaacgcaagcacgcgtttttctactggtcgctccggctcggccttgccgcgcttattggagcgggcgccgtgctcctgctcgctttgtgcaacgtcatataagagaagaatgccgcatttttcccccgtatgctctcatatattgtggtgaagagcataggggggatttgttttgaatcaaagccggttttgtaaaatggaaatcatgggcgtcttattcacattcctgatgggtacgctgctgcatttcgtttatacctggtcaaacggagcggtctggagcatcctgttcggcgcaatcaacgaaagcgtatgggagcacgttaaaatcttcgcaatgccttacctgctgtggggcgttttcgagcttgcctgcgcccgcccgtatttcaagatgtttgtcatatcaaaggtagtagggctttattttcttgctgctgccattattcttttttattacatctattcaggcatacttggcagcaacgtccttgcagtcgacattatcagcgtttttgtttggatatcgcttgcgcatgccgtttcctaccggcttgcattgcttgagcgggacatccgcgcatggttcgtacccgcgctgttcgccctgctgctgtttggggcgatgtattttggcttttcagccgcgccgccgcgtattgagctgttccgggacccggtcacaaatacatacgggctttacacggcagggctttcagcatatcagtaacgccattcgcacggagaaaaaatgtcctttttttcgtttacaggttccttttccgccgttttgtgatataatttaatattattgcgcaaaacaaaaaggaatggcagacgagccggagggacgtatggaagaaaaaaggggaaacgacctgataattggaaggaactgcttaaatgaagcgctgcgcggcgggcgtacgctcgaccgcgtactggtaataaaaggtttccaaaacggcgccctgcgtccgcttgtcgcaaaggcgaaggaaagcggcgcggttatcaaggaggttgacggcagaaagctcgacctgattgcgggaggcgcatcgcaccagggaatcatagcatacgcggccgtcagggaatacgcacaggtggatgacatttttttacttgcgaaggaaaaaaacgaggacccgtttctcattgtcctcgacgaaatagaagacccgcacaacctcggcgcggtaatccgtaccgcggaatgtgccggagcgcacggcgtaattattccgcgcagaagaagcgtggggctgtcctacacagtaggcaaggcgtcggcgggcgcggtggaatatatgccggttgcgcgcgtgacaaatatcgccgacacgctcgagtcgctcaaaaaaaggggcgtgtgggtatacggcgccgatatggatggcgaagcttggtgcaaagctgatttaaaaggcgcgatagcgcttgtcataggcagcgagggcaggggtatttcccgccttgtccgcgaaaaatgcgacgcggttttatccctgccgatgcgggggaaaatcacgtcgctcaacgcgtcggtcgccgcaggcgtattgatgtacgaaatcacaaggcaaaggatgggcctgtaaacgggaagaagcccgtgaaaaggagatgatacagcgtgggcggaaaagataaggacgcaaaaggcaagccgtcaatttttgaccggcttaaaaaattgatgaacgcgacggagccggatgaaagccagattgaaaacggcgaagtggatatcagctcaggcgacggccagccgcggcccattatggaggagattttcagcgacagcaaccagaaaatgaaaacgacaaaaaccagcccgctcggcgacgctgataaaaaggagcggcaaaagcccgtacacctgcgcgtggttaagcttgaggatataaaaaaagaagccgcgcaggaagaagcagaaagcccaaagacagagaaaacgcaggcagcgcctgccgaagctgcacaggagccggagaaaagcccggagccaaaggaaagcgccccttctgaaaacacgccgcagaaggaatctgcatcaaaagagcaggaagcgccgcggcaggataaaccacaggagaaacaaaaagaaagcacgcaggacaagccggtacagaatacgcggatggaacaaaacatacccgcgcaaagtaaagcgcagcaaaaacaggaagagattgaaccggcagccagaaaagatgcagccgggcctgaaacggcactgccggatgaaggaaaggccaaggaacctgaaaacgctgccgccgcgacggtaaataggccttccctgcctaagcaagtaacgaagggggccgcagccgttacaaatgaacagcagccggacgaccgcctgctcgatatggaggctgcaaagtccgcagcgctttatgatgaaaaagagagcctgctcacaaggctttcaggcaagctttcggcattttggggctttgtcaacgcaaagccggatgaatacgcaccggacgaggaagaccctgcaaggcaggaggaaccagccccttcagacgagccgattgaaattctcaaaaaaccggaaccaaagcagcggcaaaaaacagccgcacagccgccgtcagtaccggagccaccgctcctaaagggacaaaaagcggaaaaagcgccgcaaaaggtacaaaaggaagccgaagaaacctcttcggcgccgaaacgctaccctgatttcgtaaagctaagcgtccagcgcctgccggagagcgacgctgaaaaaatgcttgtcaacggcgtgcgcgtgcctgaatatatccatgaaaacgacgtaaagaaaatcgtacttcccggcgacaaaattcaacataccataaaaaaggaatacgaggaatatatcaagctcgaggtttttaaggaaactgtcgggaaaaaggcgccgaaggaggaaaagccttctgaaaaggcacctgaaccagccgctaagggcgatacgccgccccttacggaagaccagcgcaaaacgctcaaggacaagctgttcggcagctatgagaacacagccgccgattacaccgagttcatccatccgcagccagcggaagaagccatcgaggattttgaacgccctgaagacgtccgcgcggtacgcgccgaaatcaacatggaacgccgaaaacttacgttccgcagcgtgatgacgggcattgcattcgttctgtcgctgattgtcgtgattttgcagcgcaatttccctagtatgcttacggaggccgtcccgaacgcggacatcatgtactgtattgtcaacctgctgcttctggctctcggcatcgccctgtgccatgtaacggtattaaacgggctgcgcccgctgctgaccttccgcggcaactccgacacagcggtcgcggtcgccgcggtcgccgcggcggcgcagggaatcgtcagcttttttgacgccccgtcgtactttgccggagaaaaaagcctttacgccttgcttgtgctgtttgcgctgctgctcaattccctgggtaagctttggattgagcgcaggttacacggcaactttaagtttattgccgcacccagcaggaaatacgcggcaaaggtcctaaatgatacggcgctcgcggagaaaatgctctccggcacaaaggccgaccagccgattgtcgcgttccagcgcaggacaaaattccttaaaaactttttaaagctttcctatacgcccgacccatgcgaaacggcggcggcaaaattcgcgcccatctgcgcggcggtttcggtcgtggtcgctatcgtattcggcattatatcaaaaagcgcgtccgacgcggtttccgctttcacggcggtcgcgtgcgttgcagtcccggcctgctgcctgcttgcggtcaatcttcccatgcgcagcctgtgcaagtcagctgtacgcagcaacgcgatggtcgtcggatttccggcggtgcgccagttttcagatacccgcgcgctgatggcggattcccgcgagctctacccgcgcggcagggtaaacctgctgagcgttaaaacgttcaattcctataatatagacaaggcgcttattaacgccgcggccgtcatgaaggtcgcgaacacaccgatgacctatatgttcgaggacgttatcgtcgacaaaggggaagagctcccgccggttgagagcgtcaagtatgaggacggcaagggcttgatttgctgggtgggcggcgaacgcctgcttcttggcacacgcgagctaatggagaagtattccatagatttgcccagcctcgattttgaagagagcaacaagctcgacgaacaaaactgcgtgacttaccttgcaaacgcgggccagctcgtcgccatgcttattactgaatatacggcggacaagcatatcgtttcggagctcaaacgcctggaaaagagcggcgttacgctcctggtgcgcacagccgacccgaatgtcacgcaggaaaaagttgcgcgcgacttccggctgtattaccgctccatcaaaatcctgccgacgagcctcggcaatctttgcaaggaagagatgtctgtaaaagaagacagctcgcgcgcctatgtttctaccagaggcaagctttcttcccttgccagggccatcacgggctgtatccgtatcaagagcaatatttcaatcgcggtctttttacagtgcttcgcggtggtgattggtatcctgtttgtttcaaccgtcgtgattgcctccggcgtcaagacgctcggcaccatagagctgttctttttcatgctgctttgggcggctgcctcggtaattgcgccaatgatacaaaagccataaacccgcgttttgattttgggaaaggtctggtgtttctatgaaaatcgccccgtcgcttttatcttgtgatttctctcaaattggcaatgaggtccggcggatggacgatgcaaaggccgattttatccatttagacgttatggacgggcattttgtgccaaacatcacctttggcgcgcctgttatcgcctcggtgcgggagttcacggctatcccgttcgacgttcacctgatgatagacgaaccgctgcggtatatcgacgattttgcaaaagcgggcgccgattacatcacgttccatgtggaggcgaaatcaaatataccggaaacaataaaaaaaataaaaagcgccggcgtgaaacctggcctggtaataaagccaggcacaccggcgcaatcggtcttcccgtatttaaaagacctggatatggtgcttgtcatgacggtcgagcccggttttggcggacagtcgtttatggctgacatgatgccgaaggtcaaagaaatccgccgggaggcggataggctggggcttacgattctcatcgaagcggacggcggcatcaatgaagcgaccatcaaaaccgcggcgctttcaggcgtagacgttgccgtttcgggtaccggcgttttcagggcaatggacgcaaggctggcaattgaaaatttaaaacaggcagccctctattaaccggccatcgcggagccaatctgcataattgcgtgggacggcgcaataggcgagccatattccgtaattttggcagcctccagcctgccgctcatacagtaacttgcgtattcgtttaataatccctgcgccttaaacggcagatatccgcctgtcgtcagaatcaggtagtaaacaccttccagaagatatgccttgctgccgcggaaaagaaagcccgcctgatacagctgctgcgtgcaggagagaaagctctccacgttgtcaaacgcgcagatgaagcagtcgcagggctttttaattttatacgtcctgcgtttctgttcgcttttcggcaggagtgtgacgagaaggatacagccttcgttgtggggcatcgcctccaccatcaggctcttgtcgctgacagaaatgccggtccgcgagcccgcaagggacaggagccgtttgagcaccctccttgaatgcgggtcgtcgaaccccatgctttcgtattccagagagaacacctgcatatcctcgttgcaaagcgaaatgataagccgtgtttcgtcaagctgttcaatcgtcatgtttctgcctccgttctcgcgcgggagacgtccgcgcggtgtaaaaaataaactctattactataatattaagcggacaggcagtgtgcaaggacgtatttctggatggttcaaattaacatggtcagacaagcttgttatatgatatgattggagtaaaggataggttcatcatgaaaatgacagatttccacacacatagttttccggaccagctcgctccccgcgctgttgcatcgcttgagaaatcgagcggcgggaaggccgtactggacggcaccgcgggggcgctgaaaaagtcgatgaaacaagccggcatttccttgagcgtgctgcttcccattgccgtgcgcccaaaacagacgccgaccatcaacactgccgcgattgcaaacgaccacgacccgtgctttgtttcgttcggaagcgtccaccccggttatgaggactggaagggcgagcttgtgcgcataaaaagggcgggaattaagggaattaagctccatcccgattttcaggaggtattccttgacgacccaaagatggtcgaggtcatgcgtaccgctgcggatatggggcttttgattacgattcacggcgggatggacgtgtcttaccccgatttgcaccgcagtaccccaaagcgccttgcgcatattttacccgagcttaagggtgcaaaaattatctgtgcgcattccggcggattccggtaccttgacgatgtggaggagcttctgctcgggcacgaggaaatttacatagatacgagcttttccatcgggcagcaggggatggacaccaggcagctggaacggatttataaaagcatagaccctgcgcacatcttgttcgggacagattccccatgggacgaccagaaaaaggcggtagaggcgtttttggcgctcgatattcccgacaaggtcaaacaggcggcactttgcggcaacgcacagcgcctgcttggataatacataggaaaggaaacggagtatgaaggaaaggaaacacggcgggctgaaatatttgcttttactctttatccccgcggcgggcgttcttgtgtattttgcttctcaaaacgcatcctttgcggaatggtacgcaacaaatttttataaatggctctccctcggcgtggatttcgtttcttcgctcctccccttttcccttgcagaaatcctggttttgctttttgcgctttgggcgtgcatttatatcgtgaaattcgtcatcaagctcattcgcggcagaagcccgcggggacgcactgtactcagcttctttatcaatccggtgcttttggcgggaattctgctgtttgtgtttgtgacgaacgccgggattaactactaccggcagccgttcgccgaagcggcggggctcagcgtcacaaagtacagcgagcaggagcttacggagctctgttattatctcgcggaacaagcaaacgggctgaggaacggcttaaaggaagacaaaaacggcgtgatgaagctttccggaacattagagcagacagcacagaaagcaaaggacgtctacgataagatgcaggacaaatacccgacgctcacaaaaggctacgggaaaacaaaacagctctatttatcgcattatctgtcctacacacaaattaccggccttttctttccctatacaatggaggcaaacgtcaacagcgacgtatcgggctataccatcccgtctaccatgtgccatgagctctcacacctgcgcggatatatgcgtgaggatgaagcaaatttcatttcgtatctcgtctgtacgcaaagcggcgacagggaactgcaatattccggcgttatgcttgcattcgtacacgcgggcaacgcgctctcctcacaggaccgcgccgtttataccgaggtgttccgaacgcttgacgaggcggtccagcgtgatatccgcgcaaacaatgcgtactgggcgcagttcgaagggccggtagcacaggcggcaagttccatcaacgacacctatctaaaggcgaacagccaaaaggaaggcgttaaaagctacggaaggatgaccgacctgctgctcgcctactaccaagaaacaaaagcaggaaattaacccgtcacagccttcattccattttatttgggaacaagcttttgttatgattatgggtacaggccggctccctattttcgtagggagaactggaaagacaagcggaaaacaagcccggggactggcagaaaaacggaagatggatacaaaaaatgaagtggaccagtaccgttttatcagcggtaccagcatttcattttacagaggcctttgcagcaggaaaccggcttgtaaaactgcaggaggataccatacagcataatccaaacaatatggggctgtgtttttgacagggagcttcggctattttgtagaaaattcggaaaaacgccccgtattgtaacactcagcggcggaatagctggggacagtgtgtcatccgtttttatgatttggacgggcatttgatggaagccggcaaaatatgaaaacgccagcgggccgtttttatcgcgcggcatgagtatggaggaagcctcgaagaaaatggaagaacccgttttcggccttgaaaaaccgttaaccggctaacctgagctttacagggcatttcataagcatacaaaaacgccccggcggggaaatccgccggggcgccgttgtgcagttttattatttgataatactttcgccgtccatttcagccggctgcggtaaacccatgatttttagcatggtcggcgctatgtcggcaagcttgccgccttcgcgcagttcgcaggggtagcctatcacgcagaatggaacggggtttgtcgtatgggcggtaaacggctcgccgtcttgtgcaaccatcttgtcggcgttgccgtggtctgcggtaataagggaaataccgcccattttagcaatcgcgtccgttactctgccaacgcacgtatcgacagcctcgacagccgcaactgccgcctcgaacacaccggtgtgcccaaccatgtcgcagttggcaaaatttaaaataattacgtcatacttcccgctttcaatgcgttcaacgcacttgtctgtgacctcgtatgcgctcatttcgggctgcatatcgtaggttgcgactttcggggaattgaccagtaccctgtcttcgccagggtactgcttttccacaccgccgttaaagaaaaacgtaacgtgcgcgtacttctcggtttccgcgatgcgcagctgcgtcattcctttgtctgaaacatactcaccaaaggtatttgcaagcgactgcggcttaaaggcgacctcaacgtttggcatggtcgcgtcgtactgcgtcatgcagatataggtgagcgggaaaaagccctttttgcgttcgaagcccttgaattcagggtcgacaaagcagcgggtaatttcccttgccctatcgggacggaaattaaagaaaatgacgctgtcgcccgcgcttacctgcgcattttcttcgcagacaacgggaaccacgaactcgtccgttacgtcctgtttataggactgttcaaccgcctcgaccgggtctgcgcatttgacgccctcgccgtaggccatcgcggcatacgccttttccacacgctcccaacggttatcacggtccatcgcatagtaacggcccataacggtcgctatctttcccacgccgatttccttcatcttctctacacactgtattacgtagtccttgccgctgctgggcggcacatccctgccatcgagcagcgcgtgtacatataccttttcaaggccctggctctttgcaagctccaaaagcgcgtaaagatggctgttatggctgtggacgccgccgtccgaaagcagcccgataaaatgcagggcagtccccttttccttcgcgttattgattgcgtggagcaacgcctcgttttcttcaaacttgccttcctccgcagccttggtaatgcgtgtcagctcctgataaactacgcggcccgcgccgatatttgtatggccgacctcgctgttgcccatctgcccgtccggcaggcctacattcatgccagaggcgccgatttgggtcaggggattattttgaaacagcctgtcgaggttcggggttttcgccgcgtcgattgcattgccgccgtcgtgcgcgccgaacccgaaaccatccatgatgattaaaatcaacggttttttcataagattcatcctttctgttgtaaaagacaaactttgtttgccctttcacccgcctattccttattttgtcccgttttggagtaaaaaggtgaaaaaacaaacagttttttgaagcaggctgctattgccgctgccttttcctttttgcttattattacagggatttttttgccggaagcggtaaaaccgcttccggcccgatttccatattatttgcttgccgccttgacaattgccgcaaacttttcagccacgagcgacgcaccgccgattaacccgccgtcgacgtcctccttgctcaacagctcgtctgcgttgccttcattcatggagccgccgtactgaatggtcattccatttgccgcctccaggtcgtaggtttctgcgacaacgttgcggataatcgcacagacctcctgcgcctgatctgccgttgccgttttacctgtgccgattgcccagacaggctcatacgcgataatgacacgcttcaattcctctttgcttacgccgtttaacgcaagcttagtctgcgcctcaaccagagccgacgtaatacccatctcgcgctcagagagcagctccccgacgcaaaggataacagtaagcccctcgtcgagcgcggcacgcacacgcttatttacggtaatatcggtttctccgaaatactgcctgcgttcgctgtggccgatgattacatattcaatgcccatttctttgagcatttcggcggaaacctcgccggtaaacgcgccgttttttgcccaatggcagttttccgcccctattttaatgttggtaccctttgccgcttccagcgccgtacacaaatcgacaaacggcacgcacgcgattacgtcgcagccggcatccttaacgagcggggcaatctggcttataagctcttttgcctgtgcgggtgttttattcatcttccagttgccggcaatgacggctttcctgagctgctttttcaatataatgacatcctttcaaattagatagattgaaacgttgagggcggaacttaatccgccctccgcaaattttttatttttcgtttaagcaggcgatgcccggaagctccagcccctcgaggaattcaagggaagcgccgccgcccgtggagatgtgggtcatcttatcggcaaagccaagcttttcaaccgctgccgcgctgtcaccgccgccgatgatggaaattgcgccgctgtcagcgaccgctttcgccactgcaacagtgccggctgcgaagttatcccattcggaaacacccatcggcccgttccatacgactgtacccgcgcccttgatggcgtttgaaaacagctccatcgtcttcgggccgatatcgagccccatccagccgtccggaatattgtcggaatcaaccgtcatggattctgtatccgctttgtattctttaccaagcttattgtcaaccggaatgaggaaattgatgcctttcgttttcgccttttccatcatttccttagcaagctctaccttatcgtcctcacagatggaggtgccgatggtatagcctaacgctttaaagaaggtatatgccataccgccgccgatgataagggtatcaaccttgtcgatgaggttctggataacgccgattttatcggaaacctttgcgccgcccaggatggcgacgaacggccttttcgggtcggcaagcgcgccgcccatcacagtgatttctttctggatgagatagccgcataccgcgggcaggtaatccgcgacgcctgctgtggaggcatgggccctatgggctgtaccgaacgcatcatttacaaaaatttcagccatcgatgcgagctcttttgcaagctccggatcgttctttgtttctcccggcataaaccggacattttcaagcagctcaacgtcgccctcctgaagggaagcggcaatgcccttagcgctctctccaattacgtcctgcgccattttgacctccttgccaagcttctcggaaaggtacgcggcaacaggcttgagggaatacttcatattaaactcgccctttgggcggccgagatgcgagcaaaggataacctttgcattatggtttacgaggtagctaatcgttttcatcgcctcgtcgatacgctttgtgtcggtaatactgccgttgtcatcaaacggtacgttgaaatcacagcgcaccagaactttttttccggcgacgtcaatgtcctccacggacttcttgttaagataattcatgttcgtacatcctttcatttaaatggaatagaattcacgcttgataatttattaacatgtgcaagcctattttataacagaacaagggagaattcaagagctatcctcccattatttacaataaattcctgcattataaaagaaattttcttttataataatcagccagcaccgtcctcccatttaagcgtatgcagctgtcccttacaggtaagctgcggatattcccattgcctgagaacctcataggcagcaaccgcgacagagttcgcaaggttcaggctgcgcgcctgctctatcattggaatacgcacacagctgtccgggtgctgaaaaagcagttcctccggtaatcccttcgtttccttgccaaaaactaaaaaagcgccgtccggatagctgattttggaatgtatatggcgcgctttggtggaaaaatagaaataaggcccgtttgtttttgtaaaaaaatcggaaagcccatcgtaatacgtaatgtcaacaaggtgccaatagtcaagccccgctcgccttacggcccgcgcgctcgtatcaaaaccaagcgggcgaacaagatggaggcgagctcctgtcgcggcgcaggtacgtgctatatttccggtattttgcgggatttctggttctaccattactatgttcagttctgccattgtttatgaacggtcctttcattttagatttctaaaaactcactgcgataatatagggatggagtggaaaaataatgacgacgcgggatgcgttaatcacaattagtgaaatacggaggtgttatacgttggctagaggtgcaatgaatgtagtcaagggaatcggcgcgggaatcgccaccggcgtggttgtaggctatatgggcagcaaaatgatgaaaaaaagccccaaacagatgaaaaagcgcgcgggaaaggcgatgcacgcgatgggtgagctggtagacggcgtgtcctatatgtttaaataagggcattgccgcaagaaaagggggaggtatcctccttttcttgtggcattttctcttgactagccaaaatcccaaagcttataattgtctgatacacaaaaaaagacaagaaacgcatatatgctttccctgtctttatcccttttcttctgtttcaattattccgtctatcagatatttataggtaacgtgaaaaatttctgcaagcgctttaatttcaatatctgttacatatcttttgttcgtctctatcctagtaatcacgtttttatccatatccattccaatggtttgcagaatacttgcaaggtcgcgctgtgaataatgatgttcctcacgaagcgccttcagtcgcgaaccaaccaaatttttctcaccattttccccacgaggctttggcatttcactcacattccttaatttgtttctatccataaaagtgcaagttaaattctacaataaaatcatgcgccaatcggttgtaaaaacgagacaaaagagaaaagatattatttttttactaaaaatgaacaaaaaaagagagagttccatgttcgttcagacggcaaaatggaacccaagacctctctgaattaacaaatatgtgcaatttttacccgtgaagcccctgctttctgcccggatacggctccctttcgttggtgcgcccgattaaataatctacacttgttccataaaaatcagccagcttgctgagtgtttcaatcggtatgttgatttttccattctcataatctgagtaggtcggctgggtaacgtttaagtaatccgccagggtcgtctgttttatctccctatcctctctcagctcgcgcagtcttgtcttaatcaaatgggtcacccctttcaatttaaataattagttaaaatgcttatggataatagagtgcgccgcttgtcgggcttctcctttaatgcgattatagacgataggtaactcctataattaaatttataggtattgctcataaaataaacaagttgtagaatcattccccaaaaaattccgcaaagaaaaccgcccgttcaatgaactggcggttcctttaataattcgtcagcggcaactccgagtactcttgcaaacatctttagttctatatcagttacaaaacgcgcaccgctttcaatctgctgtactgcattctttccaatatccagcccctgcagctgaagcttttccgcaagcatacgctgagaagtctgcgggcttttcttcagccgaaaatatcgtatcatcctgccgcttatattattagcgcccccgggcgccctgtttttgaacactatcatcatcccctgaattccaggcgcgaatgtctccgggtttacgaaaacggcgcctgtggtagtcagccgtcatttaagaagcatttcatatggcgtattcagcactttggcaattgctttcagctcaatatccgtaacaaaccggcttccgctctcgattcgctgtacggcatttttatctaaatcgactccataaagctgaagcatatccgcaaattttcgttgtgaggttcttggaatcatctgttctcttagccgcctgatttgttccccacaaatattgttgcgcgtacctgccctgttcttatacatttatttcacctgcccttgacatttagtaatagtcatttccaagtataaaataattcgaggaacaaatgacattaactaagtgtcaaacacataaataaaccactttctgtgttaataagcagtaaacacatggtgatttattctatattcacataattaataaatttatttttctttaaatataaaataaatagtttttgtaaaaacaatgcactttaataaaaccgaaaatcagggtatttttaaattcaaattaatctcattttgtctcactttcgacaccaatcgaatcttttgtatgctataaaatctagtcaggtgcaaaaaatgatacaaaactattggaaatgatgtgattacatgccaaaaccaagggcaaaagacgggagaaagaatttaataggagttcagttaaaaattttacgtcgagaggcgggaatgtctacacgcgacctcgcgacacaacttcaactgaacggggttgatatcgatagaaatgtaaagtacagtttacaagggactacacagggtaggtatctgacgggaggggttccgcccgtcagattttccatgtgatattcaagctgtcgcttgtggcggctatggtggtaatcattaaatccaccacccgccgcttgtcgtcaaaggatacattctcccaagtgtcaaggtagccggaaatctggctgacctgttccgggctaatggcttccaccgtcagttccgctatcctcgccagaagttcctgcttgcgcccgtccagttccgctatcttcacattcacataggagagcaggacattgtttgcgcctgtcagactgtccaccagcttttcaatctcgctatccacatgggcaagctccacttgcagtgctgcaattttcgggtttgcctttgccgctttctttctgcctgtcagcgtcttgtagcttgccagtttctttaccatctgctgataaacaaccgcttccagttccgaagtaatgattttcccgcacccggcacagcttttattgtccagccgttttgtgcagcgaaggtattgcttgccggagggattgaagatactcataagggcatacccgcagtttccgcatttgatttttcccgccagccatgtatgggtagcttttcgggcagactggattttcatgttgttcatcagcttcttacggcaggtcagccagatgtcggagggaacaatgccctcatggggagccagtaccagcatttggtctttcaagtcgttctttttgctgggcttcacatcccgcccttgatacagatagcagccgttcatgcctgtaaaatcggtagcgtcattgacaatgactgtcccttgacttttgaaaaactcgtacacatcaaggtctgcctgcacatagacaggattgcgtaacatctgcgccagcgtggggcgtatcagttctttaccgttgaataaaatcccctgttcggcaaagtaccgggtaatgtccccataggaagttgtgggctgagcatacatctcaaacatcagccggatatttgccgcttcatctgggtttaccaccagcttctttgtgttgataccgtccaacttaatcggctctgtatggaagccgtaaggggctttcccacccatcttgaaaccacgctgactgcgggagtagtaagcgtccgttacccgcttctgtatggtttcccgttcaagctgggcgaacacaatacagatatttaacatcgcccgccccatcggggtggaggtatcaaacttttccgtagaggacacaaactctacattgtactgctggaacagctccatcatgtttgcgaagtccagaatggaacgactgatacggtcgagtttgtaaaccacgacctttgcaatcaagccccgcttgatgtcccgcaccagttcttgaaacttcggacggtctgtgttcttgccgctgtaccctttgtctgtgtattccttgcagttaccgcctttcaactcgtatttgcaaaattcaatctggctttcaatggaaatgctgtcctttttgtccaccgattgtcttgcatagattgcgtctattcgattgttcatattgtcgctccttttcttaaaaaagaaacggagctgctgacacctttattataccgtcagcagccccgcaaatcaacgatggcttcggaaaatcttatgccccggcttcctcactctgccgtttgtcggcatatttgcggaacacctcataaagctgctgttccagctcccggcgttttgccgcttcctgctccggcgtgaataccggggagagattttccagcgtgatttcctttccctgaaaagccacgacttcggtttctttcttgtatctgatatgctccatagtacctccatatttaattttcaaagtgcagtgccgccatgctgcggcgtgaaatgttttctgtcattgatcaccgttcccttgtgtgccgctgttgccgtttcagttctgccagcacctccggcgggatacggtctaccagccgctgaatgtctttcagctcgctttccagctttgcccgttccatcgtatctttcatcttgcctttttcgctggctttggctctggcttccaactgttcattttccgccaaaaggtcgtttatcgtgaccttgtattttttgagctgcccggagaagttctccatctgcggaaaccactttttcagcagggagagggcttcctctttcttctttccagcgttgaacggggtaataccgtccagtgtggcttcaatggctcttgcctgtttggagagattgaccgcctgcttgaacagacgggtggggatatgcttcctgcctgtcttgctggcactctccccacgctccaagtcaggatatttctccaccatataggcgtgaaaatcgtcctgccattttgtcaagttcgcccggttgccgatgatttctttagcgcacagacggttgtcctccgtcagagggacaaagaccaaatgcagatggggcgttttctcgtccatgtgtaccaccgccgacacgatattttctttccctacccgcccgattaagaaatcagccgccctctggaaaaattcctgtatctcctttgtggacttcttcttgaaaaactccgggctggcggtaatcagcgtatccacaaaccgggtgctgtccttacgggtacggcagccagcctgttcaatgcggttttgaatgaagtggtaatatcgtccctctggcttgacgatgtggaaattgtacttgctccggctggtgtcaatgtcgggattgctggcgtactgttccttttgccgttcgtgatgggcttccagcggtcttgccggattgcccttgtgcttttcaaatcgcaaaattgcgtgttgtgccatgaaactcctttccccattccattcctttccgggacttttccacaggaaaatcccgcagaaaatatctcggataggataggaatggataagatataaataaaatcgttttaatctctgtatttctatataccgtccggttttcgtacttcaagaggattgattatcgtacttgtggagtgcggttttcagttctccggcgttccataaccggatttcttgaagtcggtgtttggaaccgcttcgtaggattttgggtaaatgcggttgggttttccacagccctgcttctggatctccaccaatccggcatattgcagttcccgcagggtgttcaccgccttttgccgcccacagtgaagcagggcaacagcctcgcagattgggtaatacaggaaaatccgcccgtactcgtccgcccagccgttcttccgggataactccgtccggcgcaggataaaggcatacagtacctttgcttcgttggacaggggcgtgaatgtaggggcttcaaaaaggaaattgggaagccgggtaaagctgaccgccttttccggctgatggatataaatggtgtttgtcatatcgtgttttgtggacggttagaagactgtttccgggggcagacggtagtttctattgccggcccctgttctgtgcttgcaaagccttgtaaatcaaggacttttcagcccctaactgtccacacaagacctccttttccgttcactttctgttttctgccgcctgtgaactctggcggcacagccgggacagtatttcgcccggttggactttgggacgaacactctgccgcagaccgcacagcgtttcaagtccttatcccggaaaatctctgcttccagcgttccgatttgcggtaagaccgaccagcggaaccacttgcagcagaccgagaaagaaatggtctggggacaggtgtgggtgtccccatcgtcaaggagcatacagttcccgtcctcataacagcagcactcccggcagatcagggcgtttgcctgtttcctctgtgccggtgtcatgcggtaaagggaaccgtcctgcctgcgctctatgggcggcagtcgtttatatgggttctctctcatgtgttccctccatttttccttagccgttctccccgaaaaggcttcctgccccattcctgcggcgtgttccggcgttggcacgctccccggacttcgggacattttgtcccgaagtggctcgttgcagtgcttcccctgccggggtattccttttcggacggtcattcatttttcaaggtgcagttcatcgatgaactaccctaagtctacacctaaaagaccgcccgccccgtatatccataaggtcggaaatcagcaccaaaaactctctatttccacgctctcggaattatggtagaatagaaaaaacggaacaagaaataggaaatgatagaggtgaactgaaaaatatggcatggttaaatttaaatagttatgaaagacaagaatatgtggaattgagattgaatgcaccaaaagccgaaaaaatattattagaattcaatccgctaaaaatctctgatacgcctgattggaaccctgcgtgggaagaatggcattgttatagaaatcctttaaggatttatcagcaggattatgagattttagttgattatttcaacaaaatatatcctattaaggatgcatttgatggaacacttgagcaggaatttagtgtctgttttgataattggatagggaaaaatgattggataaaaattattttcgaaatagaaaaagacttaaacggtgttttggatggagaaagaatttttttgacaggctttcttgaatggttaaaagaagcactcaaatattcatctatcatcgtagttgagggaaatttataaatacatacagagtttcttaagcatgggaggagggagcgcatggaactatccatacaagaacgattgaaagacctgcgtgtggagcgtgggctgacgctggaacagcttgcggagcagacgcacctctccaagtctgcgttgggcagttatgaaggagataatttcaaggacatcagccattatgcccttattgagttggcaaagttttatgaagtgactgttgattatctgctggggcgttctcaaacaaaaaatcacccaaacgccgatcttgcagacctgcgtttgagtgatgatatgattgaactattgaaaagcgggctgttagataatcccctcttgtgcgagctggcaacgcacccggattttccccggctcatggccgaccttgaaatctatgtgaacggcgtagccacaaagcaggtacagggcgcaaacgccatcgtggacgcagtgatcgcaaggattatgaaacagcacaatcccggcttgaccgacccgcagttacggcagcttattgccgcccacattgatgatgacagcttttgccgctatgtgatacagcaggacataaacaagatagctcttgacctacgggaagcacataaggacgattttttcagcgtcccggaggataacccgctgaaagatttcttgcagaccgttgacgaagccgctaatccagacagcgaccctgaacaagcagctttggcgttcatctgcaagcggctcaaattgaatttgaagaagctgtccgaagaagaaaagaagtggctgaagaagattgcacagaagtcggacttgctgaaaaatccaaccccacagcgggggagaaagtaagagagcgacaaatcggaatttaggcttggagaggaatccttcaaatgaaagaaaaaataaatggatttttaatagaaaatgctatttctatttttgctgtaggagatacagttgaaaatatatttcagttacattatggagtaacaaaatgcagttcaaatgatttattcaagcaactgatagaatatggaagtgtagccacattgaatgagttttgtgaaggtcaattaatgcctcaaattttttcgcaaggaaaaacaaaagcaatattatgcaaaccaactaaaaataagatagtaatattattcttggaatctgaattaaatgctaaagaaaattatacgaaagcaatagaccttgatttgaaagttaaaacactatttgaatgatttaaaactataaatttatcgaggagatagcaaagccagccgagccagtcaacggtcaagatgaacggcgcatttcatgcgccgccgttgacagccccgcccgtctttgctaatgggcaatcaaggcgggaaagccttaaaatggcttcccgcccatttcaattttgagagaaaaatccgtctgctttttcgtaagtgtggccacaagttcgggacattttgtcccatagttcggcgtaggacgagggacgggggctttcatatacgccctgtctgctgatgaaaccagtcctgcgcttgcggctccacgccacgcaatcacagtcctgttttcctgccgtttcaaatgcccttgccctctccggcggcaacggcattttcacggcaacgccgacagagcgtataacacactacactttgctacgcaaagtcgtgtgccaaggggcaagcccctttggaaaccccagacaacaaaacaggctgaatatctcgcacttccccggtgcttgatattcagcctttatttgttgtcagcagcccccgtttctcggtctgcgtgtagttccttgtaaactgacctaattagccgtatagagaacaacaggcgttatgtcactgatattgaaatcagggagattgccaaaatatttcatgttacatatgaagaattaatagatggctgattataaagcagttttgcacctagcccaagtatcggcagtaaagggccataaataaaaagagaaggaaatgcgtgcatttccttctctttttatttggaaagcgccgcacatgcggcatctacaattttctgtttggcgttctccagcgggccttcgatggtacagcctcccgccgcggcatgccccccgccgccaaacagcgcacacagttcactcgcattataaccgtcggtcgtgcgaagcgaaaccttgtatgcaccgtcgcgccgctctctcagggtaattccgatgcaaacaccctctacctgccgcggaagcgacgcaaggccctcaagctcgtcattctcagcgccgcttttatctatcatctttcttgtaatgcagataagcgcacagcggccctgtgcgaaaaattccatagaatccagcaccatacgctcaatttccagcctggcccgcgatttcgtatcaaacataacacggttgatttccgcagaatgcgcaccgtaatctaccatctccgccgcagtgcgaaagctctgcgcagtcgtattcgtgtaacggaagcagcctgtgtcggtggtaattccggtaaaaatgcaatcggcaatttcctgtgtaataggcgccttcatttggcggattacctttataataatttctaccgtcgcggcggccgtgctgtctacaagggattcggaggcataacgggtattcgagccgtgatggtcgatacaaaaatcgatgttcccctcatacttttccttttctacacctagcaggctttcatcggcaatatccacgctgcagataaaatcctcattaaattggagattctccataccgtcgcaaagatattcaaactttttgggcagctcgcccaccacacaaacccttgcttttttcccaagcgataaaagcgcccggcaaagcgcaaaaccagagccgagcgtatcgccgtccggaaaatgatgcgtgagtataaggatgttatcgtgctgcagcagtgtatttgccgcctgttcaatcgtaatcatttgaaccgtccttttcaaggtcgtgcagaatgcgcgaaatattcgcgctgtattcgatggaatcggttgctgtaaactgcagctcgggcacatgcctgagctttaggcgagcgcccagctcgcgccggatgtagccgcccgccgactttaaccccttaaccgcttcctttgcggcctcctggccctccatcgcgctgatataaactttacaataagacaggtcgttagttacctctgcgcgtacaacgcttatcagggcattcttcacacgcggatccttcagctcccgtaatatcgcggtaagctcacgcttgatgtcctccgtcgtgcggtcaattctgtgtccgctcattttgccacatcctttaaacaggtatttcctgtttattattcctgtcccgcgcgcaaaacgagcacgaagggcagtggtaatttgtaacaataaattttatttattcggtatattcctcaatcgtataggcttcgaggatatctccctctttgatgtcgttgaaatgctccaggccgatgccgcattcgtagccggctgcaacctccttgacagaatccttaaagcgctgcagggaaccaatctggtcgtccgcgattacgattccgtcgcgtacgacgcgcacattcgcgttcctcgtaatcttgccggaaaggatatagctgcccgcaatgtttccaatgctttttaccttaataacattacggcattctgcacggccgagctcaacctcacgtgtttttggagcgagcatacccttcatggccgactcaatctcctcgatgcagtcgtaaatgacgcggtacaggcgcatatccacgccgtcgcgctccgcgttctctgccgcgaccgggtccggacggacgttaaatccaacaataatggcgttggacgcgtccgcaagcatgacgtcggattcattgacagcgccgacgccgccgtggatgacgttgaccctgacttccgcgtttgaaagcttttcaagcgactggcgcaccgcttcgacggaaccctgtacatccgccttgacgatgagcttcagctcctttacgtcgccaagctgcatctggtcgaacagattgtcaagcgttaccttcgtttggcggctgaacagctcttccttctgctttgtcttgcgctgctcgacaagctccctcgcaaggcgttcgtcggaaacagcgttgaaaatatcgccgcctgccggtacgtcgtcaagtcccgtaatctcgaccgggtaagacgggccggcggtttctaccttttcgcccttgtcgtttgtcattgccctgactctgccgacagccatacccgcaacgataatgtcgccggtatgcagcgtgccgttttgaatgagcatagtcgcgatagggcctcttcccttatcgaggcgcgcctcgatgacggttcccttcgcagcacggtcggggttggctttgagctccttcatgtcggcaacaagaatcaccatctcgagcaggtcctcaagtccctgctttgttttcgcagacacggggatacagggcgtatcgccgccccattcttccggcacgagctcgtattcagtgagctgctgcttgacgcgctcgacgttcgcgccttccttatcgattttattgattgcgacgatgacggaaacgcccgccgccttcgcgtggttgattgcttcaatggtttgcggcatgattccatcgtccgccgcaacgaccaaaatggcgatatccgtaacctgggcgcccctggcgcgcatggtggtgaacgcctcatgtcccggcgtatcgaggaatgtaatgtccctcccgtttatctgcacgcggtaagcaccgatatgctgcgtgatgccgcccgcttcgctcgcggtaacattcgcatggcgaatggtatcgagcagggaggtcttgccgtggtcgacgtggcccataacaaccacgaccggcgccctggaaacaagattctcatcgtcgtcctcgctgtcgtcgataatacgttcttcgatggtgacgacgacttccttttctaccttcgcatggaactccatagcgacaagcgacgccgtatcgaaatcaattacatcgttgaccgtaaccatggtacccatcataaacagcttcttgatgacctcggccgccgttgccttcaggcgcagcgccaattcgctgacggcaatttcgtcagggatggatacggtaatcggcttgcttttacgctctgccgcaattcttctcaggcgctccgcctcagtttccttacgggaattgcgcggcctgcccctctgctgggaacgctgcgtaatcttctgcttctggacagtgttttccgtcttgattttttcagaggcaagacggtcgtatttctcgttgtaccggtcgatattaacgacgaccttactggtatctactactcttttatcgggctttcccttaaaaggtacattgttgtttgcgcctgtgttctgctggggcttctgctgcggacgctgctgctgtgccgggcgggaaggatttgtcccttgttggggtttttgtttgttctgctggggcgcggcctgctgctttgtgccttccggcttttgctgcggcggctttttatcgcccctgagagccttaagcgcctcttccttcgccttctgggcgcgctcctgctcctgctgtttttcgcgggccctttcctccgcatgctcctcgattgcgcgatcccttacggcgaagtactcgtcaaagctttcggccgccatctgctgggtatagtaatcgaacacgacatcgagctcatcctcgttcaatgcggtcatatgtttcttggtctctccaaagtgcttttttaaaagctctacaacgtccttgcttgggacgttcaaatcctttgagacctcgtgtaccctgtatttaatcaacataaattacattcctccccgttgttcttgctgccctgcgcaaagctttttgattttctttgcaaagcccgcgtcgtttatggaaacgaccgaagcgtattttcccagggccgtaccgatttcatccttagtgctgttaagccggatgaggtctgtgtggtattcttctatcaggtaaacaatatctttttctgtgtttttggaaatgtcgcccgcgaaaagcacgagccttgtctcaccctttaatatggagctttttaccgggtcgcagccgattgatatccggccggcacggcggcatagccccagaagggacagtatcggattattcatcgcaggcaagctccctctccattttatcatatacctcgtccggtatccggcaggaaaacgcgcgttcaagccgtcttgccttccttgccgccctgaggcagccgaggcttttacagacataagcgccgcgtccgggctttttccctgtcaaatcaaggctgatttcacccgggccggtagtttccccggcctcgttcttctggtcaggcgctttcaccacccggatgagctcttttttcggtttcatttcgccgcagcccgtacatttgcgcagcggtacctttttctgatgcatatgcttcccgcctttccttcgcaggattttgctataactatttattccccggccgtttcttcttcgggcaggcttcctttttcttcctcctcagaggcggcagactccacatcttctccatagaaaccgctttccgggcggatatctatcttccagcccgtgaggcgcgcggcaaggcgcgcgttctgccccttgttgccgatggcaagcgaaagctggccgtccggcaccgtaaccctgcaggccttggcgtcgtcgggggcaagcgtaacgtcaagcaccgtcgcgggagaaagcgccgcggcgataaatttgaccgggtcgtcgtcgtattcgacgatatcgattttctcaccgcctagctcgtttacaatcgtgccgactctggcgccccttgcgccgatgcacgcaccaatcgggtcgacgttgctgtccttgctccagaccgcaagctttgtgcgggagcccgcttccctggaaacggacttgatttcgactgtaccgtcgaaaatctccgggacctctgtttcaaacaagcgcttgacaaaatcgggatgtgtacgggaaatgaccgcgcgcggccctttttcgccctcgcgcacatcgacgatataaaccttgatatgctcgccctctgtgaacgcttcttccccgacctgctcgcttttgggaagcaccgcctcagccttgccgattttgagcgtaacgttccccgtcctggggtcgattctttcaactgtggcagtaacgagctcctgcaccctgctctggaattcctggagcatctgccccttttccccgtcgcggatgccctgcctgataatactgcgggacgtctgcaccgcaatccttccgaactgctttgggtccagcgcaagccctaccttctcgccgaccgcggcagtcgggtcaatttccctggccttctccgccgaaatttcaaaatcggggtcttctatatcctcgacgactgttttaaacagggtgacttcgaagtctcctgtatccttatccataacaatcttgacgtcctcattgccgccgtatgtgtttttacacgcgattacgattgccttttgaatctgcgtgagcatataatcctgcggaattcctctttccttttccagaagcgccaacgcctcaaacaattcgcggttatccattttcctacatcagcctttccatatattactcgttgctttattttccttatataaacacgggttacaggtcaaaatcgtcaagctttacccatgccgcgtcctttttatcgattgtgacctcctgcccgtccgcgtccgcgatggtaaacgtcagtttatcgctggctgtcagcgtgccgccaaattccctgccgagcacaggcagcggccttatcattttgaccaggacgtccgaaccggtgaaccgctcataatgaaaatcccgtacaagctcgcgttcaaggccgggggaacaaacctccaggcaatagctttgctcgataatatccgcctggtcgagcggttcgtcgagcgcgcggctgaccgcttcgcagtcctcaatggtaacgcccgtttccttatcgataaatatgcggaggtaccagttcgcaccttccttcaaaaagcgtacatcccagagcgcaagccccagcccgccgacaatcggctgcgcaagcttccacaccgcctccgcggtatttcctaagccatttctcgccatcagcatattccttccttcggcgggtgcccgcctgctttttcttttgctcaaaagaaaggagcgggtttttcttcccactcctcgactttacactattcaactgtattagtttaccacggtatccataaaaatgcaagcttttttcattttgcccgcaatattcccggctttgcacgctgtaaacggctatttcgccatccggcatgattgctatttggtaagaatctgtccatcccgcatctggttgtgaatcatcatcgtaatatcgcgcgcggttttctccgtctcacagagcgcgcgcaaatttttctcatggctttttataataaccgcgttttcactgcaggagacgctgcggacatcctccaggctaatatcaaaatccacgtacctttccttctcccgtacagtgccagcttcctgcactgcccttccccggattcccccgtcatataaaatgatttcatgattagaaatggaagcggaccggtaaagcatgcagccgccggtcaggataagcaaaacagagattatcagcgcaagcccttccggccaaaaggacagctccgcctgccggctgatgacgattccaatcatcgcagtaccaagcgccgcgagcgccccgcctgccgataccctgcccacggaaaccttcggctgcgaagaggcaataattttctgctgcccgttatacactgcttcttcccaccctttcctgcaaagcaagccgcttttctttctcctccaggcatatcgtcctatttttgtaggctcttttatgtgagattctacataactgtatttattttatggaagaaatgtacatttttcagatattttaaaacaattatgctataaagtgattgaataaatgttaaggagcggttatatggatgaaaataaagagacggcagaaaagaaggtattatcggagcttctgcgagagctggagcttgaccccagcatcttagaaaaaatcgggtttgcagtcagggcgttccatgtgttccgcacgttcgacgtggtgccgtttggtgactgcgaatttgaggatttcttttgccttgcgtgtctggcagcgagcctgatggcaggagacagggacgcagagattgaaaacgcctgcgagattatcgccttatgcctggagctgagttgcggcaggcaggagggcgaaagatggaaagagggtgccgcaagtgatacatagcagctatcttgaggagctggacggacttttgcgccgaatatccgaagacccacagcggcaggggctttgcgccaaaggcaaggcgctggagggggaaacagagcgcgaagagctatatctcgatttcagctaccaaaagctcgacgaggttggctttgcccttacctgttttgagtacctgcgggcgttggaggaactgcgattttccgctgaagagtgggagagtttaaagcacagctttgtcctcggcagccttgtggtaagcggcggaaggccgacgcgcgaagaaactatcaaaaaagcgtatgagagcataaaagaaatgctcacgcgctgcgtgggcatatcctgcaatagccggcggatagggcaaaccgatgaagaaaaggaagcacgaaaaaacaaaacagccttatcataacaatatccctatccctgcattagacggctaggattggaacagccgtttttccctctaccgcaaatgtcgttataaggccgcactgcataaaagtaaataaatcaagtaattcagctgtgcgttttcatcgcttccttgttcaacttgtatcttaaaatgattttgagattatactttttaaattttagaaaatcactatttggtccatttttaaaataccatagtatttatgaattgtcaagaaaaactatactattgtattaaaatcatggattggattgattgtatgttaaacgaacaaatcaaaacccttcgaatggctcaaaacatcagccaggtagcgcttgctaaaaaattgggggtatcaaagcaaagcgtttccaattgggaaaacaataatatccagccctctatcgatatgctaatgaaaatcgccgcgttttttgatgtttcgaccgactacttattgggaactgaacaaaaacaaaccattagtacggctggcctggacgacgtagaaatttctcatattaagcttctgatttcggacttaataaaaagaaagggcggttcataacgaaccgccccttctgtaatttgtaaaggaaattatcccttgaccgcgcctgctacaacacccttgatgatgtatttctggcaggtgaggtagaaaatgacgaccggaataatcgcaagcacaatcatcgccatcatggcgcccatgtcgatagcgccgtagccgccgcgcaggtattggattgccatcggcagcgtgcggatattcgggtcggagcctagaatcagcgtcggcagcaggtagtcgttccatatccacatggtgttgaggatagccaccgtaatcgccgttggcttgagtattgggaaaacaatcatgaaatacgtccgcagcgtgccgcagccgtctatcatggccgcctcttcaatttcgagcgggatactcttgcagaacccggtaaacatgaacaccgaaagccccgcgccaaagcccagatagatgaaaatgataccgaacatgttgtccaaaaacagcatattggcaacctgcgtcatcgggtacatgaccatctggaacggtacaatcatggaaaacgcgcacagcaggtaaagaaggcttgtataccacgccttgaccctgacgataaaccacgcgcacatagaggtgcacagcacgataaacgccacggaaaacaccgtgataaacagcgaaacgccgaacgctgtgaaaaagttgattttttcaatgccgccgagataattgtccagaccggcaaaggagtcggcgctcggccacgcaaacggctccgtactgataaacgcctttcctttaaaggagttcatcaataccagaaagattggagcgagcaccgcaatcgcgacgactatcaggataacaaactttacccagtccctgccgcgcatccttgtcttgattttctggtttttcctgggagcggaaagctccgcagctttttgtgccgccatcagctttccacctccttacgcctggtcaggtaaagctgggtcagcgcaatggccgcgacgatgacaaagaaaataacagccttggcttgtcccacgccctgccatcccggccttccgtagaaggtgttgacaatatcgagcgcaagcatctgcgtctttttgcccggggcgcccgctgtaagcgccaggttctggtcatacagcttaaatgagttggtgagcgttaagaacgtacaaatcgtaatggatggcataacctgcggtatggtgattttaaagagcttctggaagctgttcgcgccgtcgatatcggcggcctccaaaaggtcaggcgaaacgttttgtatgcccgcgatataaataatcatcatataaccgacaagctgccagttcataaggatgacgaggccccagaagccataggcggggtctgtcgtgatggtcgcgttggagtagtaaaggataccgttgataatcatcagccagatataacccaggacgatgccgccgatgaggttcggcataaagaaggtcgtcctgaacaggtttgttccctttatagcctttgttaataacaaagccaaaaggaaagccagcacattgatggtgatgacggaaatcacggtaaacttgaccgtaaaccaaagcgcattgacaaaatcagggttggaaaaggccttgatgtagttgtcgattccgacccactttgcgttggtcacagtggtaaatttggtaaacgaaagataaatacccatgataaacgggataataaacgcaaccaaaaacgcaagcactgtggggagcgcaaagacaggaaaccacttttttatcgttttttgcatacaatcctccttttttgttattaaaaaaagctattttacccaatccaccccgtacccgaaggcacggggtggaccaaacgtacattttcagtttctaagtcaggattatcctaatattcagaactataatcaggcggttgccgccttttcagcagcccaggagtcgataactacctgtgttacgccttcccagtccttctggccctggacatactcgagaagggcagcgcccatatcgttcttgaactgctcgctcgggaatgccgtaaagagccactcgaggttgtggatgtcgccgctttccttagccttccaggcaatgacttccttagccagcggatcgtccggctggtcagcctctgtaaaggtgttgaacggagtgatgaagccgaggtcgtttgttacggtcttcttaccgtagtcgctcgagaagagccatacgaggaagtcgatggaagccttctgtgtcgcttcgtcaacctggctgttgattgcaaaatagttttctgtgccgatgcagataccctgcgtctcttcgcccttcatgcctgtgtagattgggaggaacttgacgtcttcggcttttgctacgttgccctttgtcgccttgaccgtattccagccccagttgccgttctgaatcatggcgcactggccgagagcaaactcgttcatggaatcgtcaaccgtcttggaggacagaaggtttttgtccgtaacggagttattgatgtaaaggtcaaaaatgttctggtactccttgttgtacttaaaggtgatttcctttgaattcaggccggcaagaatcgggttgtcgtagttcttgtcttccttgaactcatagtacagcggaatgtttgcaaggtgggtctgccatctccactggttgccttcagacatggaggtgctgccgaatacgcccttgattccgagctcgtccttgagcttggtcatgtcttcgacaacagcctgcagcgccgcgaagtttgtgatttcgtcaaccgatgtaaagtctgtgcccttattcttggaagcaaagtacttatccatgattgcgttgttgtagatgatgccgtagccttcaattgcgtacggaataccataaacgccgtcgccgtctgttacagcaaggcccttgttctcttcggtgagcatcttgtaaagctcggtatccttaaggttcgcgctgtagtctttccagttctggtagccgacggggccgttaatctggaagattgtgggcgggttggattttgcgatttcggaggtcagggtcttctcgtactcgccggaagccgcagtaactaccttaaccttgacgcccttttctttctcatactcttttgcgatagcgtcgtatttctcagaaatctcgggcttaaagtttaagaaatagatttccttgacgtcgctgccgcccgccgaggagttgccgctggccgtactgctggtgttgttgttacaacccgcaaagattgtaaccgccatgcagagaaccataagcactgccaaaattcttgtaaccttgcgcatgtgaatttctccttcttgtcttaaaattttatttggtttttcccctataaagccgaggcttcggcttaataagcaatgttgcgacaagttttttgtaagttttttacaaatttttccatgaacgcttgtcttcatgagttatattaacattttggagcttcatttgcaacagttttttctgtaacgattgctgacaatattgtaataaaataacaatgaaattttttcaccacaacatcttgtgttttttgtaatcgtttcctatatattgtgtttccactctctcaaactatacaaaaatattgaacgatttttgtacgcgcaccatacgcatgaaaaaagaggcgccgcaagcctgcgacgtccctattatttgccgaaaggtatcaaaatattttcttatcaaacgaaaacaagctgatatttcttattttataaaattctgccgcagcctaagcaggttctcgcactcttcctgttgtgctcgccgcagtccgggcaaaaccacgtgccgtcgctttttggaaccactttggccgtgcggccgcttttgcccgcaccggcacccaatgccctcgcctggtcctccacaacacgacccgccatcggagcggctgaaacgcctttcgcgcccgcaccggcaatatcctttaaatcaaggctgtctaaaagcgttttcaaatccctttttttcgggagtttttccccacagccctggcaataatttgtgccgggcaggttctcagcggaacacttcttacaatgtattgttttttcttccatgacggccaacgcctttcccgcagtctggttttgttttttctcctgcatatttattataacaggcaaaaaaatttttaaaagaaatatatgtcgaaaaactgcacaaatatcttgccccgcttttgtataaaaacaaccgcgcgcccaacaggagcgcgcggaaaagctttggtttctttatttcgtaattgcgttaatcagcccgcccttttggatgatattctggataaactccggaaacggctcggcctgataggttttccctgtcgtctcgtcggtgataacgcctgtgttaaaatcgacgtttacggtatccccgtccttaatttccctcgcggcctcgtcgcattcgagtatcggcaagccgatgttgatggagttgcggtaaaaaatgcgggcaaaggtggaagcgataacacaggaaatacccgacgccttgatggcaatcggcgcgtgctccctggaggaaccgcagccaaaattcttctcggcgaccataatgtcgccggcgcttaccttatttacaaatcccttgtcaatatcctccatgcagtgggaagcaagctccctgtgagaggatgtattcaggtatctcgccgggataataacgtccgtatcgacgttatcgccgtatttatgtactgtaccgtgtgcgttcatgtaaatccttcctttctatataagcaggtcaaaccttcgccgggtcagtaatatagccggtgacagcgcttgccgccgccacagccgggcttgcaaggtagacctcggaatccacatggcccatcctgcctacaaagttccggtttgtggtcgatacggcacgctcgccctgcgcgaggatacccatatgtccgcccaggcatggtccgcaggtcggtgtggaaacgaccgctcccgccttgacaaaaatatcgaacagcccctcgtgcatggcctggagccaaatattctgcgtacccgggaagataatgcagcgcacgcccttggcgagctttttgtcctttaatatttcagccgcgattctcaggtcggtcatcctgccgttggtacaggaaccgataaccacctggtcaattttcacctcgccgacgtcatcaatcgttttggtgttttcgggaagatgcggaaaagcgaccgtcgggcgtaaagcggacaggtcgatttcatacaccgcgtcgtactgcgcgtcctcatccgccgcatactcgacgggcgttccctggaaccggccgtccgtataggcgcgcgttatttcgtccaccgggaagatgccattcttcgcgcccgcttcgattgccatgtttgcaatgcaaaggcggtcgtcaatgttgaggtaattgagcccgtctcccgtaaattccatcgacttgtaaagcgcgccgtccacgcctatcataccgatgatatgtaaaataacgtccttgccgctcacatagggggcgggcttgttcttcaaaacgaactggatggcggagggtaccttaaaccacgccttaccgctgatcatggccgccgccatatcggtggagcccacgcctgtggaaaacgcgccaagcgcgccgtacgtgcatgtatgggaatcggcgccgatgcaaagactgcctgggccgacaagccctttttcgggcagcagcgcgtgctcaatgcccatttcacctacgtcatagtagtttttgatatcgtatttgtcggcaaactgccgcacctgaagacattgctgcgccgcttttatatccttgttcggggtaaaatggtccataaccattgcgatttttgtattgtcaaacacgcccttcgcgctgctgtcgttgaacacattgattgcaacgggggacgtgacgtcattgccgagcaccatgtcgagctttgcctcgatgagctgccctgctttgacctgcggcagaccggcatgcgccgccagaattttctgtgacattgtcatacccataaagataacctcctgaatattgattgcaggggtattatctcacagcccttgataaaagaatgtaaactatgctacaatctaaaggaaatcgcaaatcatacgataaggttggggttttatggaacgcacaatggcttattatgggaacaactacgctgatttgccggtcgggatacgcggcgtatttgaaggtatgcagaccggcaggctttacgtcaaagaccaaatgatttatacgcagggtgaaatggccggctgcttttactatttaaaggaagggcaggccaagattttcttcagctccccggacgggatggagaaaacgcttaccgtcgtgggcgccggggctatcttgggcgaggccgctttttttgacgagatgccgcgcgtatcctccgcaaaggcactgcaaaggagcattattatcgcaatcgacagaaaccgcctgcttgcaaagttccgcgaaacaccggggcttgccatgcagcttctgaaccttcaggcgcgctctatccggatgctctccgcccaggtgacgagcattacatttttgcaggcggactgccgcattgcgcggcttctgctccaggccaaaaccatgcgtcccgacggcagcgccgcggtcgatttgactcatgaagaaatcggcagcagcgtgggcgtttcgcgcgtaacggtcagcaaaatattgaacggctttgcccgtaaaggcataattaaaacagcctaccgcagcatattgctcaaagacatggatgcgctcgctgaaattgctgattttgaataaacagcttaaattcttcaattcgtttaataaattattatatttgttaaatattgaaatttatcttgcaattataaaaccatattggtataattaagctgtgccaaaattccgcctgcggaccgcaggcatatttctccaaccccctccatacatattgtaatggaacctgcctaccttttaacagaaggggcggccgctaaaacggccgccccttctgttttatattttactgtgccgccatggcctggcggggtgaaattttcatcatgctgtgtaaaagcgtaagctcgcaaagcagcggcacaataatcgtcagcagcagcgccgccgcgcacaaggcaaggaaatcccaccagcttaccacgtatatccggttgacgaacgccccgtttgcgttgattaggttaatcacaaacacagcaagcgccgaaattcctcccccgattacgaacgcgcgcaggccgagcgccgcctgctccagataaaggcaccagaaaacctgccggtttttgtagccgatagctttgagcagcccaatttccgctttacgcccgagcaggctgttcgaggtagacaggaacaggttaatgactgtaagcagtaatacagcaacggtaaagaagttgcccgccgcgataaacacgtttgcaaacagccccacgtcttcggggacagtctgttgggttcccggatacacatgaactttcatattctgtaaaatcctccggacttcttctacattttccgccctgtccaccaacacggtaaagctgtgcaaatccgtccgtttgagcgcatcgtaatattcctcgatatatatttcactcttagtggcgccgacagccatccgctcgatttggttcgccgtctcgttcgaaacataaacggtattcgggtttccgccgccttcataggaggcatggtacacgcctaccaccctgaatttgtattccagcgccgggagggaatcccactgcgtcatgtaaacgccgccgctgtttttatagtccaggatatcaaaggaatctccccatgcctttaccgtaagcgtctttcccaggtagtccaagccgttttgcatataaccgtccttcttgcctccctgtgtgtcataatcatcaacagggcagaaggaatccgggacgatgcaggagaaaacagggctttcgtcgagccgcctgcccgcgacgacgtctattttctgcgttttatagagcgcccatgtttctattgacgcgtcctcaggcggtacgggcagcatatcggtacagtccccgttatcgtctgaaaccttgttgattttaaaaaattcgtaatccatcccgtcttccatatcgaccgacagcacatgctccttcttttcgatttccccaagtagctccggggttaacacccgcattccatcttcggtaaagctggtatctatatacaggcgccttgccgggtcctgatttataaagctgtctagggcatggctgagcgtggcagtaaagctcataatcaacgtaagagaaaacacggaaagcaagagcaaaacaaaaaccgccctgccttgcctattacgctttctgttggcttttgcaagaaattgatagttttgcagcttcatactgtcacctcttttcaggagccgatatgccgccggcacccgacgctccgggcggcgcaggcagcactggcactggattaacttgaattaatactgctgtgaagtcacgacagacgagctgaatccgccgtaggtattgtcgtaataatgcacgctagagccatacggtaccctatcaaaatatattgtagggtgtgagggggaatttccctgtaagtagtagggctgttttttatacgtttttccgttttgaacgacctttgtttcacccttgctataactctttccgttataaattgttatgtatgaattaaacgtatcggtcctattcccggtcttttctgcattgaacacaaacgatgtgctccccgttgcggcacagcttaccgtgtgcgtccaagactgtgctgccgccgacgccgaaccaatgcagcccgccataaccagcatggcaatcatgattgccgctgccgtcctctttgtgaatttccgctttgccgttttcttcgctttcattattatattcagtcctttcttttttggtttgaacgccctgcgcctgcccgccggtttcagcgggggtacagcctgcccatcggaaccgcctccctttctctattttccaatcaaatactagcatattttatatataaattccagtaacctgtgatgtttggtagttattctggtaagtttggtattttcgtatgcctttaattcggaatttgacctgtttttcgggcggcttctatacaaaaagaaagccgcgcagcgtttgctgcacggccatcaattgtttcttttatatttaaaaaatttcttcatcgcccgtgcttattttcgttctttcattgctattgtgccgccatggcctggcggggtgaaattttcatcatgctgtgtaaaagcgtaagctcgcaaagcagcggcacaataatcgtcagcagcagcgccgccgcgcacaaggcaaggaaatcccaccagcttaccacgtatatccggttgacgaacgccccgtttgcgttgattaggttaatcacaaacacagcaagcgccgaaattcctcccccgattacgaacgcgcgcagaccgagcgccgcctgctccagataaaggcaccagaaaacctgccggtttttgtagccgatagctttgagcagcccaatttccgccttccgcccgagcaggctgttcgaggtagacaggaacaggttgatgactgtaagcagtaatacagcagcggtaaagaagttgcccgccgcgataaacacgtttgcaaacagccccacgtcatcgggaacaaaatgttctgtagatgtggatacgctgattttcatatcctctagctgctcgcgaactttttcgacgttttccgccctatccaccaacacggtaaagctgtgcaaatccgtccgtttgagcgcatcgtaatattcctcgatatatatttcactcttagtggcgtcaaccgccatccgctcgatttggttcgccgtctcgttcgaaacataaacggttctcggatttccgccgccttcataggaggcatggtacacgcctaccaccctgaatttgtattccagcgccgggagaaaatcccactgcataagatagacgccgccgctctctttatactccagaatctcaaaggattttccatccacctttaccgtaagcgtcttgcccaggtagtccaagccgttttgcatataaccgtccttctcaccgctctctgtatcgtagtcatcaacagggcagaaggagtccggcacgatgcaggagaaaacagggctttcgtcgagccgcctgcccgcgacgacgtccattttctgcgtcttgtagagcgtccatgtttctattgaggtatcctcaggcggtacgggcagcataccggtacagtccccgttatcgtctgtaaccttgttgattttaaaaaattggtaatccatcccgtcatccatatcgactgacaccacgtgttccagcctgccaatttccccgataagctctggggtaagaatttgcatacccaaatcaacaaatgtggtattaatgctcagccgccttgccgggtcctggtttttaaagccgtctaaagcacggttgagcgttgccgtaaagctcataatcagcgtaagggcgaacaccgaaagcagcagcaaaagaaagacggagccgcttttcttgttccgcctgctgttggactttacgagaaaatttatccgccagagcttcatatgcgcttcctttccgccgggcgcgggatttccgtgcccggcttcttattctgcttaataggtttgcgttgtcgtcagggaggatttaaaccctccgctggtgtttttgtaataatgcaggcttgaaccttttggaactttcccaaaataataggtcgggtgtgaggcctggtttgcatataagcaatacgcttgttctccataccttattccatttttttctactctacaattccccacggttttatctttgccgttgtagatggtaggataggaaccgaacgaatcggagcgcgtgccatcgtggtcagctacaaaattaaatgacgtactgcctgtcgcggagcaactgatggtatggttccacgactctaccgccgccgatgccgaaccaatgcagcccgccataaccagcatggcaatcatgattgccgctgccgtcctctttgtgaatttacgctttgccgttttcttcgctttcattattatattcagtcctttcttttttggtttgaacgccctgcgcctgcccgccggtttcagcggggtacagcctgcccatcggaaccgcctccctttctctattttccaatcaaatactagcatattttatatataaattccagtaacctgtgatgtttggtagttattctggtaagtttggtattttcgtatgcctttaattcggaatttgacctgtttttcgggcggcttctatacaaaaagaaagccgcgcagcgtttgctgcacggccatcaattgtttcttttatatttaaaaaatttcttcatcgcccgtgcttattttcgttctttcattgctattgtgccgccatggcctggcggggtgaaattttcatcatgctgtgtaaaagcgtaagctcgcaaagcagcggcacaataatcgtcagcagcagcgccgccgcgcacaaggcaaggaaatcccaccagcttaccacgtatatccggttgacgaacgccccgtttgcgttgattaggttaatcacaaacacagcaagcgccgaaattcctcccccgattacgaacgcgcgcagaccgagcgccgcctgctccagataaaggcaccagaaaacctgccggtttttgtagccgatagctttgagcagcccaatttccgccttccgcccgagcaggctgttcgaggtagacaggaacaggttaatgactgtaagcagtaatacagcaacggtaaagaagttgcccgccgctgtgaaaatagaagcaaataacccgacgtcgtcgggtacactttgcatggttgacgaaaaaacactaatccccatttcttccatctctttgcgcacctgattcacattgtccgcgtcatctaccagcactgtatagctatgtagctcgggcttttttttatctgcataatattgctttataaattctttatcggcactggattcaactgccatttgctcaatttttttccctgtttcgtttgatatatatatttcattaggagaaccttccccatcatatgcagcttgaaatataccaaccactttaaccttatattctaatgctggaaagtaataccactttgtagtatatcccatatcgcctgcatcatagtaatacagcatatcataggagtccataattggctctattgttaatgttttgccaaggtaggccactccatcttgcagttcatacccacttttatctgtagaataagtattgtccgggcaaaacgaactgggaattatacaggaaaacactgggctttcatctaagcttttccctttaatgacttcttttttttctgttttatacagggaccagccgacgaccgccgtatcttcaggttcaactggaagcagatcggtttggtctatgtcaccatcctttacattttttattttatatatttgataattcattatttcatccatgtctacagataagacatggtcaatttctcggatattttctaatatttcatttgtcagtttttcttttccaaagctaataaaggatgaatcaatgctcaagcgccttgccggatctggatttcgaaagttctccatggcatcacctaatgtcacagaaaaactcgtaacaagcatcagcgataacacagagagcagcagcaacgcaaacactgcgcctccgcgcttattacgcttcctgttggcttttgcaagaatttgatagttttgcagtttcataaaatcacctttcccagggaaggtatgccgccctgaagctttggctttcgggcggcgctttatttgcgccaaatgtattggcttaatactgctgtgaagtcacgacagacgagctgaatcccccgtaggtattgtcgtaataatgtacgcttgctcctgtgggaacttttccaaaattataagtgggatgggaaggtgagtttccctgtaaataatagtcttgtttattaaacaccttactaccctgctttacatggcacttacccgtactgtaactttttccattataaatagtaggataggacgaaaacgtgtcggttctggttccatagtgattcgcattgaacacaaacgatgtgctccccgttgcggcgcagcttaccgtgtgcgtccacgactctaccgccgccgatgccgaaccaatgcagcccgctataaccagcatggcaatcgtgattgccgctgccgtcctctttgtgaatttacgctttgccgttttcttcgctttcattattatattcagtcctttcttttttggtttgaacgccctgcgcctgcccgccggtttcagcggggtacagcctgcccatcggaaccgcctccctttctctattttccaatcaaatactagcatattttatatataaattccagtaatctgtgatgtttggtagttattctggtaagtttggtattttcgtatgcctttaattcggaatttgacctgtttttcgggcggcttctatacaaaaagaaagccgcacagtttgctgcacggacgtctctttccattatattcttgtttttcaaaaataaatcagctcgtatttatcctcccgttttttggttgcctgcctcatagcctgcggggcggcaaaggccggcaaaggcttttaaccgccagaagctatatcaatttaacccgcccctaaaaagctttgtttcctttttcgcctatttttcctgcaatccaacgtaagagaaagcgcgcttgatagggtaaacaagaaaaattttaggtattcagccatttatataaagaaattaccgaaaaacctgcataaaattaacagattgttttttgattttttcgttgttctctgatataatgactccggaggttatgaaacggccaacagggccagaaaatatgaaagggatggttacggaatgaacataatcatgcttttaaagccaaagtgtgatgtatctttcctatacgacgataacaccctgcgccaggggcttgagaagctgcgttatcacggctatacggcaattccagtgattacacgcgacggctcctacgccggcacggtgacggaaggcgatttcctgtggcatatgctcaaaagagactcctttgaaatcagggaacaggaagacttttttgtgcgcgatattctcaagaagggttggaatccctccgttaaaatcacgaccacaatggaggaacttctgctcaaggtgatggatcagaactttgtacctgttaccgacgacagggacgcctttatgggaattgtcacacggcgtgatgtgctcaagcatttttaccagctgcaaaagcagcagcaggcggtctcgtaaacttaaaaacagccgcccttcctttttgtgggaagggcggcatcatttttttgttcaagacgcaaacgggacgtcgtctaccgtggtatcctcaatgtcgtctggccccaaagccggctcaaccggaaagcggtcaattattttggcaatatattgctggatgagcaatacatcgtaaacggaaatttttccatcgccgtctacatcgccgtatttctgctcgccggctgtcagcacaaggattttcgcaagcgctttctgaagcagcagcgcatcaggaagcgtaaccgaaccgtcgcaggtgacgtcgccgtattttccgtagtgcggtgcgtccgggtcgtcgcgcaggtatgaggcaaatttcgtaagctgccgaaaggcggattcaatttcttcaggggaagcctgtccctctttttcagataccacggccgcggcctggtatgcgccgaggaatgaatcaaagccgtccttcgcatagcgttccggctgctgcgatattgctttgcccctgcccagaagaagtctcagttcctccgcattgggggagaactgcgcgtcagcctcggcggtaagggatttaaattcacccgtcatatactcataatcggacagggtaagattctttagctgtttgacatatcccctaaacaaatcgattgcctgcatatatgcgcctagctcatactttgtcagggcaaagccagcaatatccagggcattttgcgttatcctcgctgtttccgcaagcatggaacgcaccagaggggattctatatgcgccttgagcctgtccgccgcttcgcccagctggctgtccgccgctgaagggtcattgtacacagcttttgcttccgcaagagactgcgtaagcgattcacgttcagcgtcgctgggaacaaacgcgttgtcagttaaaatacgttccgactgcgcaataaattcccccagtaccccacggtagccggaagcgttctccggctgtggcgaggcggcaaagacagcacacacagccgtgctgagcagcagtatggcggcaagcagaatactgattaattttttcatataattcctccgtttcgggtggttctgttatagtcagtcagaaactgtttttccttagaaaattcccaaatatactatacaatattttattggctgaatcaaacaaattttttatgtttatttattgaagtgaaagaaaaccccacaagactctgacaaacatataaagataaagggatggcgcgctgcgccatccctttaaagaggacgagtcataaacatcatccgtctgttttcgctatatcgccgtgttcccgccacattattaggcggtttctttcttccttctgacgacaactactacggccgctgccgcgagcatcagcagggaaagcgttacgacagccacagcgctgttatcgccggttgtcacatcgcctttgccgttcccatcatttgtcggggcggaggtgggcgcattggtcggtgcggcagtaggcgcgtccgtaggggcgatagttggagcctccgtcgggtcctctgacggattagacgggtctgtcgggtctgtcggctcctctaccttttcaagcatgctgattgcatcctgaagattaaagaaagcaagaaaaatatcttcttcatccgctgtttcatcgtcataaacagactgggcttcgttgagcgcaagctcaaggtcttcgaggctctcctgcgtgtacagctcactgccaagatattcctgtgccttgtcaataagcagcttcaggtcgtcttttgtaagctcttcaaaggaaagcctatcatacagctcatacagctcaatgacgagaagcgacgccgtattgtattcttcctctgtaatcacatccttgccggcgatttccgcaagcttatcgagtgattcgttcacctgtgcgagctcgtcctcggttagaagaaaaccgaacgtatcgcgcagctcgatcagatattccaaatcggcctgcagctcttccaaagcggcgtccgggtcaaacggtacatcgggtccaacagaattaatggtttccatcagctctataaaagcattttggatatcctcctgtgtggagctcgggtcgttagcgattgcctccgctttctccatcgcgccttccagcagggcaatttcgtcttccgtcagctcaattgccatgccgttgtcgagcgccatgcggacgacctcgcacataatgagaatggcctggggcggaatttcgtccgaaggcagctcctgcatatactgcgacaggatggcgtaagagtttaaaagccccatcaaagctgtctgaagctgcaggtcggttacattctcattttcaatgaccggtttcgcggcctccagggactggttgattatatccagcgcatcctgcgggatgtcgagcccgtcgattgtgagcataatcgtgatgatgttgtacagcgatttgacaaccgccgaggggtttgcgtcttcaagtccgccatccattgccgccgcgagcgcttccgagacgtcgtcctgctttgcggacgccgtcgccggcgcagcaacgcacaggctgagcactaaaacgagcgacaggataacgcttaaaagtttttgcattttcttcatgtcctaaatcctccatatttgttcttttcttttctcttggggattacccgaatatactatactacattttattagtaaaatcaaacaaaatttttacgagtttttattgatgtgaaatattttctcacatgaagggttaaggcaaaacaaaaaaggggggcggcgcttttgcgccgccccccttaaaaaaggattctgtaaatttatttctccgccattttttcgagcttctcataccgttttgccgcgtagtcctcagccttttcaaagagcttttccgctctttccgggaacgcgcgtgtcagcgcgttgtagcggacctcgcccataataaagtcacggtagctggcagacggcgccttgctgtcgagcgtgaacgggtttttgccctcgtccgccagacgcgggtcgaagcggaagcagttccagtagccggcggctaccgccttcttctcttcctcctgcgctttgctcatgccgcccttgatgccgtggttgatgcacggcgcgtaggcaatgatgatggacgggccgttgtagctttccgcctcgttgaacgccttgatgcactggttgtagtcggcgcccatcgcgacctgcgctacgtaaacgtagccgtagctcatggcaattgccgcaaggtccttcttcttcgttgccttgccggcagcggcgaactgcgcaaccgagcctaccggggtcgccttggaggcctggccgcctgtattggagtaaacctcggtgtcaaatacgagtatattgacgttttcgccggaagcgataacatggtcaaggccgccgaagccgatatcgtaagcccagccgtcgccgccgaaaatccagatggatttcttagcgaggcagtccttatcctggagcgttttctttgcaagctcgcccgcttcacaggagcagtccttaatttcctcgagcttttcaatgagcgcgtcggccgccgtgcggttcttgccgctgtcggtgacagtgctcaggtaattttcacaggcttccttgaggtcgtccttgtcggtgccctgcgcaatcttctctacatactcgcagagccttgcgcggattgcgttctggccgagcgccatgccgtagccgaactctgcgttgtcctcaaacagggagttcgcccaggccgggccgtggcccttcttgttgaccgtataaggcgtcgccggagcgctgccgccccagatagaggaacagccggtcgcgttcgcgataaacatcctgtcgccgaacagctgggtcgcaagctttgcgtacggtgtttcgccgcagcccgcgcatgcgccggagaactcaagcagcggctgcttgaactggctgcccttgacggtggtttctttaaacttctccgtaacctgaggcttcgggtcaagcgcaaagccgtagtcgaatacgttctggcccgcgcgctgcgtatcgatgggcttcatgatgagcgccttctggcccttcttgcccgggcagacctgtgagcaggagccgcagccggtgcagtcgagggtagaaacggtgatggagaagttgaggccctggatgcctgtcatcgggatgctcttcgtgccttccggcgcgttcttaagctcttcatccgtcataacggcggggcggataacagcgtgcggacatacataggagcagaagttgcactggatgcagttttcaggctgccattccggaacatctaccgcaatgccgcgcttttcataagcggaagagccctgcggaaccgtgccgtcgatgtggtccttgaacgcggaaacggggagcttgttgcccctgtatgcgtttacggggttgaggatgccgttgacataatcgacgagagcctcatcgccctgcgcgagtgcgtgggtaatttccttctcatcgctgtccttccagcttgccgggacttcgacctgcttaacgtcctgcatgccgcgctcaatcgccttgtggttcatgtcgacgatggcctggccctttttgctgtaggaacgcgtagcggcgtccttcatatatttgacggcgtcctctgccggaatgatgtttgcaatcttgaagaacgcggcctgaaggatggtattgatacgtccgccaaggccgatttccttaccgatggcgatgccgtcaatcgtgtaaaggttgatgtcgttctcagcgatatatttcttcattttgccgggcaggcgctctgtaagctcgtccgcgtcccatccgcagttgagcaggaagctgccgcccttcttcaaatcctctaccatgtcgtacttgtcgacataggacgggttatggcaggcaacaaaatcagccttgctgatgtagtaggtggatttaatgggctggtcgccgaaacgcaggtgcgaaacggtgatgccgccggattttttggagtcatatgcaaaatagccctgcgcgtacatatcggtatggtcgccgataatcttgatggagttcttgttcgcgccgaccgtaccgtccgcgccgaggccccagaacttacaggacttggtgccggcaggcgtggtgtcggggttttcaacaaccggaagggaaaggtttgtaacgtcgtcaacaatgccgattgtaaagcgcctcttcgggctctcggattccatgttgcggtaaaccgcgacgatgtctcccggggtggtgtccttggaagcaaggccgtaacggcccgtatatacgtttacgtttgcgtactcggaagcgttgattgccgcgaggacgtcaagataaagcggctcgccaatggaaccgggctcctttgtcctgtcgagtacggaaatgctcttgacggtcttcggaagctctttgagcagatagtccgcaacaaacggcctgtaaagccttaccttgataagaccgaccttgtcgcctgcggcgttgagataatccacgacctcttccgcgcagtcgcagacggaacccattgcgatgataaccctctccgcgtcgggcgcgccgtagtagttaaacggcttgtagtctgtaccgcatttctcgttgaccttgttcatataatctactacaagctcaggaaccgcgtcataataagggttgcaggcctcgcgtgcctggaagaagatatcgtcgttctgcgcgctgccgcgaagtaccggatgctccgggttcaggctgcggcggcggaaagcgtcgaccgcgtcccagtcgagcatatcggcgaggtcctcgtagtcccatgtctcaatcttctgaacctcatgggaggtacggaagccgtcgaagaaatggaggaacggaaccctgcccttgattgcgcacaggtgcgcgaccgcgccgaggtccatgacctcctgcgggctgttggagcaaagcatcgcatagccggtctggcggcatgcgtaaatatcggaatggtcgccgaagatggagagcgcatggctcgtaatcgtacgggcggatacatggataacgctcgggagaagctcgccggccatcttatacatattcgggatcataagcagcaggccctgggaagccgtataggtggtcgtaagcgcacctgcggcaagggaaccgtgaaccgcgccggcggcgccgccctcggactgcatttcagtaacttctacttctctgccaaacaggtttttacgtcctgcggcggaatacttgtcggtctcgtcagccatgacggacgacggggtgatcggatagattgcagcgacatctgtaaatgcgtaagacacatgtgcagccgcgttgttaccatccatcgttttcatttttctggacattggactgtttcctccttaaaaaatgcgtgcaaagcaagcataataatgaatataccaataattgcacactgctgtgccaacttgaattttagcacgtttaaagcgggctgtaaagtggaaataacattaaatttgtttgaataaaattttcttttgaatttaaaaatacatatacggaaaaaagcacaaacatgcgatgaaacagggcaaaatgcacaacctgtacagccccggcccgtccagtaaagagccgggggtcctgctgtgtgcccaagtgctggcattttgctcgtttttgtttgacaaattcccttgaacatcgtaaaatatctgtaatatcagctttgataaggaaaggggaaaaaccgatgcctgacgacacaggtggaagtagcaacggaaagcggcagaacaggctgcttaaaatattcgggcacagcgcgctcgacaaaataacggagcaggacatcctgttccttgtaaatgccgggaaagagaagggcatgattgagagcagcacctgcgcgatgatagaaaatatatttgagttcgacgacctgaacgccggcgagctgatgacgcaccgcacggatatcaaggcgattgaagatacggacccgctttgcgaagcggtggatgtgtttatagagacaggctattcgcgtattcctgtattccatgaggatattgacaacatcgtgggccttctgtacgcgaaggacctgcttggctacgtcggcggggaaattccggcggactttaagattaccgatattgcaagggacgcgttttacgtgcccaagtcgaaaaactgcagcgagctgtttacggaaatgacagccagcaaggtacagcttgccgtcgttgttgatgagtacggcggaacggaagggctgattacgatggaggatttgattgaatccatcgtcggaaatatccaggacgaatacgacaacgaggaagaggaaatgcgccgtttgagcgacaatatctacacagtggacggcgcggcagacatcgacgacgtcagtgaactgattggcgtaaagctgcccgacgacgactgcgatacgatagccgggctgatgcttgaaacgctcggcgaggttcccgcggccggagacaggcctacggtcgaaatcggcggggtaaagttcaccgccgtggatatcgaggagcggcgcatcacgcgcgtgctcattgaaaagcctgagcaaaaaggggcgcagaatatttaaaaaccgggcaggggcgaccctgctcttttcttatggactggcagaagggaagcgaatggaagatgtttgacgctgggttgattttagagggagggggtatgcgcggcgtatacacggccggcgtgctcgattttttcctggataaggggctgtggttcaaaagctgctacgccgtttcggcaggggcggggcatgcgtgcagctaccttgcgcggcagcgcggacgtgcctttgccgtcaatgtagactatctgggcgataaacggtacatgggcgtttccagcctgctcaaaacgggcgacctgttcggcgcggatatgctgtataagattatcccggaggagctttaccccatcgattacaaggcgtttgccgaaaatgaaagccgcctttacgccgccgtaaccaattgcgaaacgggacaggccgaatatatccccatcagggatttaaagaccgacttgatttacgtgcgcgcgtcggcctcgcttccgatggtttcgcgtatggtagaggctggcgggaataaataccttgacggcggcgtatctgattccatcccaataaaaaaatccatagccgacggcaataaaaagaacgtgctcgttctgacaagggacggctcgtaccgcaagcagccaggcgcaatggcggctctcatccggacgaagtaccgcaaatacccggcgctcgtcgaacagatagaacggcgctacctgcactataacgaggcgctcgattttattaaacaggaggaagagcggggcagggcgttcgtaatccgtccgagaaagccagtcgatatcagccgtacagaaaaaaacaaggaaaagctccgcgccctctacgaggagggctacagcgacgcggaaatggcgcacgggccgctgatggaattccttggctaaacatcaaagcttttgccgcgcaggaacctgcgcggcctttttgtatataagccggctatgggatatgttttttgtaattaagggtataaaagaggccttgccactgggtcggcttctgggcaaaaagtgaagggcggcttgattgccgcccttcacccccctaaaatcatgtcgaacccttacaaaaacaagaaaaaaagggaggggtatatatttatctcttcgtcaaaggcaaccggccttgctggaacagagcttgcctaaataaatgacaaagagaaaatatatcagataaactatgaacatgacgataaaaacagcattcaagccttttgtgggttttgcccgcccctgccaaaataaaataatttcatccaggggcgggcgttgccaagagaggtagataagaggataggatgggagaagagaagaaaagagatgctatctatattaaaaccacatttcacgattggcatatataatctgcttttgtttcttacataacgaattacagttcaaatcaggtgattcctgcgaaaacagctaactatattagttgttttttagattataccatataggtattgcatttgtaaagaataaacttaaaattttttatatcttttttgttttttcatataatatatatccgtaagttcttggaaggagcggattatattgcttgctgataccattatgaaccggataacagagcttcgggagcaaaagggcgtatctgaacgtgaaatgagcatagcgctcggcaaaagccccaactatttatattttatgaaaaaaaattttgattatcccgaaaaacccttgaaatacaagcacattcgcaggatttcagattgattttactaccaatttactacttttaacggattgcgccttgatatgccggaacatcttgcgagcatgaaacaacccaatacaaacgcgacgcactggcggcgcggcacgtcggcaatcacacaatttcatatagcaccgcactggcggcgttaccttatcccaaccgggaaacaaggaacgccgctatttttttaccctcatgttacgcagtaggggcaaaaagagtcttgctacacaaggctttgcgggtacggttttcacagggtaagggattgatacctaaacccttaaaatcgctgttctaccgcgtaacaaatatgcagcaaaggagttgatgaagctatggcagttttccgcgtggagagaaacacaggatatacggttatgagcaaccaccatttacgcaacaaagaactttccctaaaggcaaaagggctgttatcgcaaatgctgtccttgccggaggattgggactatacccttgcgggactgtcctatatcaaccgggaaaaaatcgacgctatccgcgaagctgtccgggagcttgaaagagccggatatatccagcgttcaagggagcgcgacgagaaaggacgcttgcggggaactgattacatcatctatgagcagccgcctaacttggatttacctacattggaaaatccaacattgggaaatccaacattggaaaatcctacgcaggaaaaacctacgttggaaaatccaatgcaattaaataaagatatacaaaagactgacttaccaaaaaaagaaaaatcaaatacggatttatcaagtaaccattccattcctatcctttcccctaacccctctcctttgagggaagaaacggcagagccggaacggaaaggaacggaagcggcagacgcatacagcgtgtatgaggaaatcatcaaggacaatatcgagtatgagcattttatcaagcataccaacattgacagggaacgcttggacgagattgtgtcccttatccttgaaactgtctgcaccaaacgaaagacaattcgtatcgccggggacgattatccggcagagcttgtcaaagcaaagtttatgaagctgaacagcagccacattgaatttgtctttgactgcatgaaagagaacaccacgaaaatccgtaacatcaagcaatatctgaaagcggtacttttcaacgcgcccaacaccattgacagctattacaccgcccttgtcaaccacgatatgtacggcggctattaaaaaacaggaggattttaatatgacacagaaaacaggagctttgatttttgatgaaacggcagaccgttacgacattcgctttgaccttaacgactactacggaggattgcattgtggggattgccttgaagtgtttgtacgcggcaaatggaagccgacccgcatggagtacggggacaactggtatcttgtcggtgtgagggcttcggatttgaacgggctgcgggtgcgtatctaaaggcggcatgaaaaatgtacgccttatttttatgccccgaagcggcacaccaccctaaccaaactatgaaaggagggatttcatgcaagatgaagtcaatgaaaaagtcgtgtctttagcaatcaaaacatctaagctgaccgccgaagtgctgcaaaaggctatgaaagccctgcttgccaaaggcaaagggcagctaaccaaagccccgcatgggaaaatcactatgcggcagcttatgaagcagggagaaaaggtttccaacattgagattaccgaccaaaatatcaaagcctttgaccctatcgcaaggaaaagcgggcttgattacaacgtcaagaagattgagaacggcaagccgccgacctatcttgtgtcttttaagggcaaggatattgacgttatgaccgaagcgttccgggaatttaccgcaaagaaattaggcagggataaaaagccctctatccgcaagctgctttccactctgaaagacaaggcggcagctctgaacgcacagaaggacaaagtgaagaaaaaggacagggaggtatcgctatgaagccggaacttaaaaagctgcttatcctaaatgccccctatctgctctttgtctatctctttgacaaaatcggacaagcggtacgccttgcgccgggggctgacctttccggcaaggtgctttcccttgcagacggcttttccgctgcctttgcaaccccgcttccgagccttgcccctatggatttgcttatcggtattgtgggggctgtccttatccggcttatggtgtacttcaaaggcaagaacgcgaagaaataccgaaaaggtatcgaatacggttcagcccgttggggcaacgccgaagatataaagccctataccgacccggtatttcaaaataacgtgcttctgacacagacggaacggcttaccatgaacagccgcccgaagcagccgaagtatgcaaggaataaaaatatccttgttatcgggggaagcggcagcggcaagacgagattttttgtgaagcccaacttaatgcaaatgcactcaagctacgttgtaactgacccgaaaggtacggttttagtcgagtgtgggaagctcttacagcgcggcgggtatcggataaaggtgctgaacacgataaattttaagaaatccatgcgttataatccctttgcctatatccgcagcgaaaaagacattttgaaactggtaaataccttgattgccaacaccaaaggggacggggaaaaagccggggaggatttttgggtaaaatcggaacggctcttttactgcgcccttatcggctacatttggtacgaagccccggaggaagaaaagaacttcacgacgctgcttgaaatgataaatgccagtgaagcccgcgaggacgacccggaatttcagtcccccgttgacctcatgtttgaacggttggaggaaaaagacccggaacactttgccgtccggcagtacaagaaattcctgttatctgcgggaaagacacgaagctctattctcatttcctgcggtgcgcggcttgccccttttgacattaaggagctgcgcgaccttatggaaaccgacgaaatggagcttgacaccataggcgaccgcaagaccgccctgtttgttatcatcagcgacaccgacgatacttttaactttgtcgtgagtattctttacacgcagcttttcaatctgctttgcgacaaggcagatgatgaatacggcggcaggctgcccgtccatgtgcgctgtctgttagacgagtttgcaaatatcgggcagataccgaagtttgaaaagctcatagccaccatacgaagccgggaaatctccgcgtcgattatcttacagtcgcaaagccagttaaaggcaatctataaggacaacgccgataccatagtcggcaactgcgacaccacccttttcttgggcggcaaggagaaaaccaccctcaaagaaatgtcggaaatcttggggaaagaaaccattgacagcttcaacacttccgagaaccgggggcgcgaggtatcgcatgggctgaactatcagaagttaggcaagcagcttatgacggaagatgaaatagcggttatggacggcgggaaatgtattttacagctacgaggggtgcgcccgttcttctctgataagtacgacattacaaagcaccccaactataaatatctttccgactatgacaagaaaaatacttttgatatggaaaagcatttaaggcgcagacccgcccttgtgaagccggacgaagtatttgactactacgaaatcagcgaaagcgatttgcaggaggacaccgaccatgaatagacgtatcagaaagaaaaaggacaagaaaatcacagaagccataaacgggcttgtttcgattgctgaacgacgggaacagcagcggcaggctgctatccggcagtttgtgaaacggtgtgaagccctgtatgagcagcagcgaaaagaaaggaggaattgacgcagtaacaaagaaaaagacaacttgcatgatacgcgcccctacaaaaattcctatcgcccacactgacaactgaataccgccgcgcagcagacatttaggcagcgcggggacttatgaccgcggcagtttgaaaactgaccgccgttttttatgcccttttacgggcaagccgcatttgcggcagaaaggagttttatggaatttttcaacagcgcaatcggcgtattacagactttggttatcgctcttggagcaggacttggcatttggggcgttatcaatctcttggagggctacggaaatgataatccgggcgcaaaatcacagggcattaagcagctcatggcgggcggcggcgttgcccttatcggcactatccttgtacctctgctttccggcttgttcggttaagcgcgggtagctacctatgcagagcatacttgacgcgattaacgaatggataaaggaaatccttatcggagcgataaacggtaatctgtcaactatgttcggggacgtaaacgaaaaagtcgggactatcgcaaacgaggtaggacagaccccgcagggttggaacgcaaatattttcagcatgatacagaccctttctgaaaatgtaatcgttccgattgcggggcttgtcattacctatgtcctatgctacgagctaatcagcatggtaacggaaaagaacaatatgcacgacatagaaacattcatgttctttaagtggatattcaaagcctttgtcgcggtgtttatcgtaaccaacacgttcaacatcacaatggcggtctttgatatggcgcagcatatcgtttccggcgcagcgggggttatcggcggcgatacgaatatcgacgttgccgaagcccttgccgccatgcaggaggggcttgaagatatggaaatccccgaactgctcttacttgtgcttgaaacaagccttgtaagcctttgcatgaaaatcatgtccgtactgataaccgttatcctctacggcagaatgatagagatttacctttactgttcggtatcgcctattccatttgcgaccatgaccaacagagaatggggacagattggaaacaactacctaaaagggctgttcgctcttggttttcaaggcttcctcattatgatatgtgtcggtatttacgccgtactggtaaacgatatgataatcgcagacaatctgcacagcgcggtattttcccttgccgcctatacggttatcctctgtttttccctgttcaaatccggcacactggcaaaatccatattcaacgcccactaagggcagaaaggaggttttttcttggcgtatgtacctgtaccaaaagacctttccaaagtcaaaacaaaagtcgctttcaatctgacaaagcggcaaatcgtttgttttgcggcggctctcttaatcggactgccgctgttttttttgctcaaaggcagcgcagggacaaaccttgcggctatggcgatgattgtcgtcatgcttccctgtttcctgcttgccatgtatgaaaaacatgggcagccccttgaagtggtggtaagaaatgtcattcagacaaagtttacccgcccaaaggagcgaccttacagaaccgaaaacctatacgctgtcttggaaaagcagcgaaacttagaaaaggaggtatcagcgattgtcaaaaggacaaacaaaaaagacgcgggaagccgcaggaaacaggcgtaagctgacccgcgccgaaaagaaacagattgccgaagctatccgaaaggctaaaggcgacggcaaagcccgcaccgcacagcagaccattccctaccttgccatgtacccggacggtatctgcaaggttacggaaaagagatattcaaagtgcgtcgtgttcgaggacatcaattatcagcttgcacaggctgacgataagaccgccatttttgaaaactggtgcgattttctcaactactttgacgcgagcgtgagcgtgcagctttctttcatcaatcaaggaacgcagcgggaacaggcagaaaaagcaatctctatccccgcacaggaggacgcttttaactctatccgcaccgagtattcggatatgctgaaaaatcagcttagtaaaggcaacaacgggcttgtgaagcacaaatacattacctttactgttgaagccgataacaaggcggctgcaaagtcaaggctttcccgtatcgaaaccgacgtgcttaacaatttcaaggtgcttggcgtaaccgcccgccccttatccggctatgaacgcttaaaggtgctgcatggggtattccacccggagggcgagccgttctccttttcctttgactggcttaccccgtcggggctgtctacaaaggattttatcgccccgtcctctttccgttttggcgagggcagatatttccgcatggggaagaaaatcggcgcggcgagcttccttgaaatccttgcgccggagcttaacgaccgtatgcttgccgacatactggacttggaaacaggggtaatcgtcaatttacatatccgcagtatcgaccagtcggaagcaatcaagaccattaagcgcaaaatcacagaccttgacaagatgaagattgaggaacagaaaaaagcggttagaagcggctatgacatggatataatcccgtccgaccttgccacctttggcagcgaagcaaagaacttgttgcaggacttacagagccgcaacgagcgaatgtttctccttacgttccttgtggtaaacatggcagacacgaagcggaaactggaaaatgatattttcgctgcggcgggtatcgcacagaaatacaactgccgcctgacacgccttgactatcagcaggaagcagggcttttatccagtgtgccgattggggaaaaccttatcccgatacaacgggggcttaccacatcaagcaccgctattttcattccctttatcacgcaggagctttttcagacggggcaagccctgtactatggcttgaacgccctttctaacaacatgatactctgcgacagaaagcagctcaaaaatcccaacgggcttatattgggaacgccgggaagcggaaaatcttttgcggcaaaaagggaaatgacaaatgctttcctcattaccgacgacgacattatcatctgcgacccggaagccgagtatttttcccttgtgcagcgtcttaatgggcaagtgatacgtctttcccctacgggcaggggcattgacggcaagccccagtatgtaaaccctatggacataaaccttaattacagcgaggacgacaacccccttgcgctgaaaagtgattttatcctttccctttgcgagcttgttatcggaggcaaggagggtttgcagcctgtcgataagaccgtcattgacagggctgtaagaaatgtgtaccgcccgttccttgcagaccccgacccggcaaaaatgcctatcttgggcgacctttacgacgagctgttaagacagccggagccggaagctgcccgtatcgcggcggcattggagctgtatgtttccggcagccttaacgtattcaaccacagaaccaacgtggaactttctaaccgccttgtctgctttgatataaagcagcttggaaagcagcttaaaaagttaggtatgctcattgtgcaagaccagacatggaacagggtaacgataaaccgggcagagaaaaaggcgacccgctactatatggacgaatttcacttgctcttaaaagaggaacagaccgccgcttacagcgtggagatttggaagcgtttccgtaaatggggcggtatcccaacagccattacgcagaacgtcaaagaccttttggcaagccgcgaggtggaaaatatctttgagaacagcgattttgtcctcatgctcaatcaagcgcagggcgaccgtactatccttgcaaagcagcttaatatttccccgcagcagatgaagtatgttacccacaccgaagcgggcgaggggcttatcttctatggaaatgtggtgctgccttttgtagaccgcttcccgaaagataccgagctttacagggtaatgacaacgaagccggaggaagtttccgaaagcggaaagtgaggtgcagaccatgaagcaatataaatcccgcgataaaatcacacagaaaatgacccgcgacgggcttattgaggtaaacgaaacacagcagaccgccgagcgtatcagtaaacgggaacaggacgcggattttcaaaagtccccggagcagcaagcggcgcaggacgggacgcagcttcaaggtgtagcgtcccaaacttccccgttaccccacgcaccgggagcttcccccgcaagggacaccgccacagcagagcgcgttatggagcatatcgaagcagcacagacccgcagagccagtaaaaaagcggtacataaagcacaggaggaagttaccgtacaaacaacatcttcccgcttgcagtttaccgaggaagaacttgccgtcccggaactggaatgctatattgagaaatcaaacaaagccgctgaccgactggacgcagcaaaggcagctatcccgaagcaaaagaaactggttaaggagcgcacctttgacgaagccgcaggaaaggcaaagacccgacttcactttgaagaacaggaaaaaccgatacccggcggcaaaaaaggaaacccgctgtcccgccccgcacaggaagcagggattttcgtccacaacaagatacattccgttgaaaaggacaattccggcgttgagggggcgcataaatcggaggaacttgccgagcgcggcgcgaaatacggggcgcggaagttaaaacagggctaccgcagccataagctgaaaccttaccgggaagcggcaaaggcagaaaaggcagcatttaaggcaaacgtcaacttccagtatcacaaaaccctgcacgacaacccgcagcttacttctaacccgctttcccgtttcatgcagaaacagcagataaaacgccagtatgcaaaggcggcaaagaaaggaggggcaaaagccgcagcggaagccacaagaaagacggcgaagaaaaccgccgaggaaacgaggaaagccgccgcatttgcggcaagacacccggcgggcattttgattgcagttgccgcgctgcttctctttattatgatttccgcagggctgtcctcttgcggggctatgttttcgggcttgacaaacggggtgcttggcacttcctacacatccgaggacagcgaccttgtggcagttgaaaacaactatgccgcattggaaaacgggctgcaaagtgagattgacaatatcgaaagcacccaccccggctatgatgaataccgctacgaccttgacagtatcgggcataacccccacgaacttgcgtcttacttgaccgccctcttgcagagctacaccccgcagagcgcacaggcagagcttgaacgtatcttttccatgcagtacaccttgacgctgaccgaggaagtggaaatacgctaccgcaccgaaacaagcaccgacccggaaaccggggaaaccaccaccgaggaagtcccttatgagtatcacatcttaaatgtgaaactgacaaacaagccgatttcagagcttgcggaggaacttcttacgccacagcagcttgaaatgtaccgggtgtatttggaaacaagcggcaacaaaccgctgatttttggcggcggttctcccgacggaagcccgtccgaggatttaagcggtgtggagtttgtaaacggtacgcgccccggaaatcaagagcttatggagcttgcaaagcagcaagtcggaaatgtgggcggctacccttactggtcttggtacggctttaacagccgcgtggaatggtgcgcctgttttgtatcatggtgctacaatcaagccggaaaaagcgaaccgcgctttgcgggctgcgaatggcagggtgtcccttggtttcagtcaaggggacaatggggcgcacgcggctatgagaatatcgcaccgggcgacgctatctttttcgattgggatttagacggcgttgccgaccatgtggggcttgtgcttggcagggacggcagccgcgtctataccgttgagggcaattccggcgacgcctgcaagataaagagctatgaccttaactatcaatgtatcaaaggctacgggctgatgaactggtaaagcaaccccaaaaagaaaggagaaatgacctatggcaaacaataaaattgaccgtatcaataaggaaatcgcaaagacccgcgagaaaatcacagagtatcagaacaagttaaaaggactggaagtgcagaaaaccgaagcggaaaaccttgaaatcgtgcagcttgtacgagctatgcgtctgaccccgcaggaactgaacgctatgctgtccggcggcggtattcccggcatgactgccgcacccgcagaagaaaacgaacaggaggaaaatgcagatgaagaataaactgaaaaagaccatgactgccctttgtgccgcccttatccttatgggcggtttttctgtccctgcctatgcacagggcgcagccacagagccgcccgccggggacgcgaccaacgacagtaatgtagttgtggaggaaaaagaggaaacgccgccccttaccccaaagggaaacgctacactggttgacgattacggcggcaataagcaacttatcactgttaccaccaaaggcggcaactatttctatatcctcattgaccgcgccgccgaggacgaacagaccgtacatttcctaaatcaagtggacgaagccgaccttatggcactgaccgaaaacggcgaagctgccaaaaagccggaaatctgtaactgtacggaaaaatgcgaagtcggaaaggtaaacacgtcctgcccggtatgtgttaccagtatgacaggctgcacaggcaaagaacctaccccaacaccaacggagcagccggaagaactgaaagaaaaaggcggcaatcccggtgtggtgcttgccttagtcctctttgccctgcttggtggcggcgcagcgttctactactttaagtttctaaagccgaagcagaatgtaaagggcgataccgaccttgaagattttgaatttgaggactacgacgaggacgagccggaagcagataccggggaaactcccgaagatgaagaaacggaggaagaaaccctatgaccctgtttaccaacaatccctttgaaaagatgatgatacagaaaccgaacgggcggcgtgataatgcgccgcctgttccttatccccctgcttgtgcttcctgcccttacaagggacagtccccttgtgtggggtactgtctgaaacaggtacaggagaaaaagaaaaccgagccggaacgctgaaaggaggaacttatatttgattttagttatcgcagaaaagcccagtgtggcacagacaatcgctgccgtactgggggcaaaggaaaagaaagacggatttctcacaggaagcggctatatcgtttcttggtgcgtgggacatttggtagggcttgcggaagctgccacctacggggaacaatataaaaagtggagctatgacagcttaccgattttgccgcaggaatggaagtacaccgttgcttctgacaaggaaaagcaattcaaaaccctaaaagagcttatgcaccgggcagacgtttccgaagtcgtcaatgcctgcgacgcggggcgcgagggcgaactcattttccgctttgtctatgaaatggcgggctgcaagaaacctatgcgccgcctttggatttcttctatggaggacagcgcaatcaaagagggcttttcccgtctgaagaacggcgaggaatacgacgcgctctttgcttccgcattgtgcagggcaaaggctgactggttaatcggtatcaatgccacccgccttttctctgtcctttacaatcataccttgaacgtgggacgcgtacagaccccgaccttaaaaatgcttgttgaccgggacgcagcgattaccacatttaagaaagaaaaatactaccatgtgcgccttgtcttatccggcgcggaagctgcaagcgaaaaactatctgaccgttccgaagctgacaagctgaaagctgcttgcgaagtgtcaaaagcagtctgtgcttcccttgtgaaagagaaaaagaccgcagccccgccgaagctctttgaccttacttctttacagagggaagcaaaccgcctgttcggttataccgcaaagcagacccttgaccttgcacaatctctgtatgaaaaaagacttcttacttatccgagaacagacagcgcatttctgaccgacgacatgagcgacacagcggcgggcattatcaagctgctttgtgggaaattttcttttatggcgggaaaagacttcacgccggagcttggaaaggtgctgaacagtaaaaaggtatcagaccaccatgccattatcccgactatggagcttgcaaagaccgaccttgccacgctgccggaaagcgaaaggaatatccttacccttgccggggcgcgtctgctcatggcgaccgctgcaccgcatacctttgaagcggttacagcagtttttgaatgtgccggacagtcttttatcgcaaggggaaaaacggtgctgtccgacgggtggaaagagattgaccgaagatacagggcagccttaaagaacaagcccgaaacggacgacgcagacagtgacacagaaaagaccctgccgccatttaccgagggacagacctttgaaaatccgacggcaaaggtaacggagcatgacacaacaccgccaaaacctcacaacgaagcgtcgctgctctctgctatggagcgcgccggaagtgaggacaccgacccggacgcagaacgcaaagggcttggaactcccgccacccgcgccgccgtcattgaaaaactggtaaagggcggctttgtggagcgaaaaggcaagcagctacttcccacaaaggacggtatcaatcttgtgtgtgtcctgccggacaccttgacaagcccgcagcttaccgcagaatgggaaaacaatctgacgcagattgccaaaggcaaggcagaccccgccgcatttatggagggtatcgaggatatggcgcgggaactggtaaagacctatccgtttctttctgatgataaagcgcagatgttcaagccggaacgggaagcgttgggaagctgcccccgctgcggttctcctgtctatgagggaaagaaaaactactattgcagcaataaggaatgtagctttaccatgtggaaaaatgaccgtttctttgaagaacgaaaagtaacctttacccccaaaattgccgctgcactcttacaatccggcaaagtaaatgtgaaaaagctctattccccaaagacgggcaaaacctacgacggaactatcgtattggctgatacaggcgggaaatatgtcaactaccgcattgaactgtcgaagaagaaataactgaatagcaagcataggaaaagagtacccttttccgtaaaatccctgctttctctaccgagaacggcggggatttttgcttgttgggaagtttcccaaaccctctgttttatggagggttttaccctctgaaaccgaagaaaggaggttacacatggcaagtttacgggacaccgtaaaggactatcaagaagaattaagggacggtatcgcttgggtggcgttttggaaaacgggacgttcttggaacgccgaatatttccaccttgaaatgagcgactacatttacccggaggacagaagccgcatggaagaaatcaaacaggctgaccctgccgccgttgtggtaaacggctattattccggctatcttggcgaggatatgaaccttgacgagctgaccgccggggtgcgccgccactacgaaaacggatatagcaatatcggggaatttatcgaagcccacgacgacaggctgccgccggagcttatcgaggaagcaagagccgccgcccccgctgcggggcttcctttctctgaaaaagcctaccgggacggcgaagaacccgacccctatatttttgacgggagcatgagcatggaggactacgaacttatgcaccgtatgattgaaaacgaaaggagcgaacgcatggtagaaacgattttaagcgggtatctttctaatcttggaaagtacaccgagggcagacctgcgggcgaatgggtatcattccccacgactgccgagcatttgaaagaagtctttgaccgtatcgggatagacggcaaaaactacggggagctgcatatcacagaataccagtcctctattgcaggactggcaggaaaattgaccgagcttgaaagccttgacgaactgaactatttgagcgaacttttgaaaatgcagtttgacgacgaccgggaaaaatttgttgcagctatggaatacggcgaccatacaagggacttgcaggatattatcaaccttgcacaaaaccttgattgttactggctttacccgtccgtacagagtgaggaagattacgggcattatctgattgaagaactggacgagttggagctgcccgaagaagcaaaaaaatatttcatgtatgaggaatacgggcgggacgctgctatcaatgacgggggcagctttaccgagcagggctatatctacaataaccgcaacacctttacacagtggtacgacgggcgcgacgtgccggaggaataccgggtaacgccgcagccgccagtacaggaaaaggaacaggcagaccttgacgcttccgcagccatacaaaccgccgccacagagcagcccccggttctcccgattatcctatcttctgaaaagcccgccgataaaatgaaagagattaccgaccgactggaacagggaattttaggactgtatgaaagcgaccgttacgccgattatctgcgtaccatgtcaaaattccatgattacagccttaacaatacaatccttatcgccatgcagggcggcaatcttgtgaaaggctataaacaatgggaaaaggaatttgaccgccatgtaaagcccggagaaaaagctatcaagatacttgcaccgtccccgtttaccgtcaagaagcaggtggaaaaaatcgacccggacacccaaaagcctgttttcgataaggacggaaaacctgttaccgaagaaaaagaaatcaagatacccgcttttcgtgtagtatctgtctttgatatttcacagaccgagggaaaagaacttcctgcccttacctatgagcttacgggcaacgtggaacaatacaaggattttttcgctgcccttgaaaagacttccccgtttgctatgggatttgaagcactaagcggcggcgtaaaaggacgctgcaattatgaggaaaagcgtatcttcatcaacgagggcatggacgaattgcagaatatcaagaccgcaatccatgaaatcgcccacgccacgctgcatgataccgcccttgccatgccggaacgccccgaccgccgcacccgcgaggtacaggcggaaagcgtcgcctatgcggtctgccaacattacgggcttgatacgtcggactattcttttgggtatatcgccgggtggagcagcggaaaagaacttgcagaactgaaaggctctcttgaaacaatccgcagcaccgccgcaaatctgattgataccatagacggacattttgcagaaatccaaaaggcacaggataaggaacagaccaccgaacaggcacagcccgcacaggaagccgccaaacagcccgaaacaaaagcagccgcgccggagcttcccgaagaaacagccccggtacaggaaaaagaagcacagccggaacaggctgcacccgccgccccttattatactatcaatgaagctgccgccaaacgtgcaaaggatatgaacagtttttccgattataagcaaggcagcgcgacggctgaatacaggcactatgtagatgaagccgtacaacttgcagaaaggcagaaacagcgggtagacccgatgtaccatgagaaaatcgacagcctgcttgacacctatgcccggaaactggcggcgaacatgaataaaggctatgagattgacgcgcgtgttccctctatcctgattgcgggcggctctaacttccccacaaggaagaaagaaaagcagaacgcagcccgcgacagcaattaccgggaatggcaggacatacaagggcttcttgataaaatccgcagtaccggcatgggcggtatcagcgcagacgacccgcaggcagtacagaagttagaaaagaaactggaaagccttgaaaaatcacaggaaaccatgaaagccgtaaacgcctactaccgcaagcataagacccttgacggctgcccgcatttaccgccggaggaactggaaaaattgaaagcagacatggcgagcagttggcatttggaggacaagccctttgcgacttgggcgttatccaacaacagcgcagaaatccggcgcgtgaaagatcgtatcaaatccctttcacagcaaaaagaaatcggttttgtaggttgggaatttgacggcggcaaggtggaagcaaacaccgaagcgaaccgactgcaaatcttctttgaggataagccggacgaagccacgcgggaagccttaaaaagtaatggcttccgttggtcgccaaaagccggggcatggcagcggcagcttaccagtaacgcctactatgcggctgattatgtgaaagcgattgctccccttaccggggaaaagcctaccgagttacagcgggcgcatatccggcagcaaaaggtagctgcacaggaacaacccgcacaggagcagccggagcaggaagccccacaggacaaagacaccttttccatttatcagataaaaggcggggacgaaacaagggacttgcgttttgagccttacgaccgtctgattgccgccggacaccgggtagacccgaaaaactatgcccttgtctattccgcacctcttacgccggggacttcccttgaagatatttacacccgctttaatatcgaccacccgaaagattttaagggacacagcctttctgtttccgacgtagtggtgcttcatcagaacgggcaggacaccgcccactatgtagacagcttcggttataagaaagtgccggaatttttgcagccggaaaactatctgaaaactgccgagcagaccaccgagcaaaactacaacatgattgacgggcagataaacaacaccccgaccgtcgcagaattggaagcaaaggtaaagacaggagaaaccatttcccttgttgaccttgcggaaactgtcaaggctgacaaggaacgtggcaaggcagcaaaaacggaaaagaagccctctatccgggcgcagcttaaagcagcgaaagaacagacaccgaagaaacaggcaaaacagaaaacacaggatttggaaaggagctgacgcatgaataagtttgaaaacgtggatattttcgcttctcttgacgctatcatgcggcagaatacaggatttttccaaagtgattttgacattgacaaggagattatcgcaaaagcagcggcaagccctaacagagaggataagacgctgctatggttttgccgcccgtccgggacgcattgttttaaggagcgcgacgtgttcctaaaggataccgccgcccacaatacatggtgtttttacaaagagcagacctgcgaccgcgttcttgcctatgccgtcgagctgacgggcagggagcgcgggaaaatcaaaggcaatctttatgagcttgactatgcaaggcagtatgagcgcgttaaggacaatgcgcttgccgccgacacagtcaagttgatttatgagcatgggacaagggagatacccgccggacagcattttaacggaaatcccgatacttctttagggaagtttgaacactttgaagcagtacccaacgacccggacgcgctacaattccttttacgggaagaaaagcaaaaacgggataaactgacaccgggcgacttcaaggaacataccgccgccctgcgtgctgggctgattgaagccgaagcgcggcgcattgtgcaggaaatgaagcgcagggacacgcccaatagccctaataggacacatttcatggtggagctgtccccgacatttatgcagcttgcgtcctctaaggacaccgaccgtctgttttccatgttgccctataagacactttccttttccaaaatcgagggcagacatggaacatacgccttgattgataaaaatgaaaaccggggcacagatattcgcagggtgcgcccctcaatccgggcgcagcttgccgctgacaaaagaaaagccgccccgaaaaaggcggctgtaaaatcaaaaaatcacgaattggaggtatgagcatgattagactgacagttgaagaaacaaacctgttgagcatttacaatgaggacggcaaacgtgggcttacagaaaacatcaacgctgcgctgccgttcatggacgaggatatgcgggaactggcgaaacgcacccttgcgaaaatcgcacctctgacagaaaatgagtatgcggagcttgctattttcgccgctgatgaggtatgaccgggataaagcggcttacaccaccccaaagccggaaagtcaacagccttataaaaaaggagtgctgcaactgcgataacggacactgtattttactggacgacggggaggaatgtgtctgcccgcagcttatttcctattcgcttctttgcaaatggtttcagaccgccgtattgccccttgataagctgctgtatgcagagcttttcaagaccgaggataaaaagcgttgtaccgagtgcggaacttcttttgcgtccacctctaacagcgtcaaatactgcccggactgccggaagcgtattacccgcagacaggcagcggagcgcatgagaaaacggcgcgcccttgttacgtagtaggggcaaaaaaagccttgatttacggggctttcagtgcttgaaaatgacgcggcaagggttttataccttatcccctaaaaatgacgttctattgcgtaacagataccaaaaacgcacctacataaaacagggcgcggacagtcttttgttggctgtctgcgccctgttcttttactttattcgtgcagttcttctatatcctttattcggttttccaataggatatacagctctccattctctccccttataaccagagtatcattttcatcggaataagttccatattccacacattctatatatccgataagtgtatttccgtcctcaaaagtaatttggattttactgtctgcgttaatataagtttctacgccataactgccattttctaatgttattctgtaacatggtgtaataccaaccattttcataattattcccgttcctttcctttcttccgttccggctctttgccttgccgcaaaatattgtctatgttctgtttgataacgtcgtattccttgacctgttttttcagcttgccataatcagcgtaaagggcttctttttgcgcttgtagtttcccgtattcttcctgcatggcggcaagattggggagtttagtaacgcccgccgctttcagtgtctttactgccgcttcatggagtatcagactgctttcctgctttgcccggtatgcgtccttatcctttgccctgcggtatgcttcatagacaggttttgtcttttggtaggtagtaacgtgcttcatcagcaccgccatatctgcaagacgcttttccacgctctttaatgcgtctgctgtcttttcattttccgcatttacttcctcaatccggctgactaaatctgcgtactgctcaatcttatgttctgtcaagaaattcatagtctttgcagccagtttcagattatggattttcgcccactgttcatagccccggctctcttgtgccttgatactgttttcaatgtcaataagcagcgatacgccgcgctgctctttgggagctttcgctgcctttgtgcgtttgccctctatccgttctcttatggcttcctctgtataatctgtaccgagagttttcagacgggtaaagcgttcctgtccgggagcgcggcaggagatatattttcccggctttatctcataacccgctgcctgtaaccgctgcaacaattcttcaaaacttgctacttgggggataagcgtatcaacggcaattttcagcttgcctttccaacttgtaccgaccttttccgcttgatattctgcatagctttttcccttgctgcctttgcccggaacgacaacagacagcccgttttcccggcacagcttatcgctcatgttccgtatgccgtagtaactgcgcttattggaattgtacttatggtagtcaacaaaattgaccgcacaaaaaatgatatggttatggatatgccctttgtctatgtgggtagttaagacgtattcatgctgtccctttgttaccgcgtcggcaagctgctttccgatttcgtgggctttctcataatctacttctcccggctcaaaggactgtatcaaatggtgggcgagattgtttcccttatctatggcttgtgcaagcgtaaatccaaactcaatatctgccgtttcatagctgcacccaaaggaggacacaagcattttcccgtctgttttatccgggttttggatatagtcaagggctttgctcaacgtgcttttaataggcttaatctttgtaaccgccatatctccgcaagcaccccctttatttcctctatgtcctcttggtaaacgctgcctgtcgcattgacacgctttgcaatctgattgatgttgaccccgattttctgtatctctgctgtcatgccttttatatcgctatggtctgtctgaatgatatacccgtcaatggcaatcttgcgaagatacgccgccatgttccgggtagggacaagcttcattttctgttcaatcaatgccctttcttcctctgttacatagaatttgatttgtatttttcttttgcgtccgttcatgcaatcgctcctttccattccgagggtttgggacacttcccaacaagcaattttcaaccgacgcaccgcaggacgggagggcgaaaatacggaaaagggtactcttttcctatgcttgctacgaaactttatcccttactacctacaacaccgggaacggcaaatttgacgaactttcccaaaagaaaaacgccgcaatctgcgacgtttcaatcactctatataaacaaaaacgagagaactttattcccccgtttcgtcgttgttggcttcctctattccttttgcagtagcagacaggattttcaaatctttttcgctcataccgtcaagcatagtatcgagctgacggcggcgcgtggatttctcctgttcccgttccgggaaaaagaactggtctactgatacatcaagcagggttacaagctcatataaaatctgtaaacttgggtgctgcccgctgttctcaatggacgcgatatatcggggcgcaatattcagcgtatcggctaactgattgcgtgatattccctttgcttttcttgctgctttaatggcttgcccgaaagccttaaaatcaaatttttctttgttctgcttcatagtcatttcacccaactacattgtatatttcatcttcctttcgagatatgattacacacagcacattattgactgaaatagagcatatcatatacttgatattattcggctatccgagtataattatactggtaaaatttgaggaaagggcgttttgattatggaatatatgtcttgtcccgaagcggcaaagaaatggggaatttctgaaagacgagtacagatactttgtagcgaaaatcgcataccgggcgtttcaaaactggggtatatgtggctgataccaaaaaacgcggaaaaaccttttgatatgagaaagaaacaacataaaatgcagatacaataaacaaacaaataaaccttacaacaactgtaagtggtgtggttgcttcttatgcagtaaaattatattcgtaagataagcgtaagcaaaaaatgtgaggtgtgagatatgaatgatacaaaaaaactattagaagtacgcgacttgcacaaagcatattccaaagagggggttccaacaaaagcactaaacggaattacctttgatgttctgaatggcgaatatttgggaattatgggagccagcggttctggaaaaacaacattgttgaattgtattgctacggtcattaaaccaacctctggacaaattttactttcaggtgccaatataagctcttttgatggcacgaagttggctgaatatcgtggcaacaagattggttatctatttcaagattttgctttacttgataatctaactggtaaagaaaatattatattgcctttatcaattcataatattgacattgttacagcggaaaaaaagctaaaagatatagcagattttcttggaattacagacgttctttctaaatttccgtcacaaatgtcgggcggtcaaaaacaacgcgtagctgctgcacgtagtttgatttctgaccccgatattattttggctgatgaacctacaggtgcattagatacaaaatcagcacgtttactcatggagaagttacaggaaatcaatcttaggcgtggacgcacaatcctaatggtcacgcatgaccctaacgccgcgagtttctgttctcgtattttgttcattcaagacggtgttattttccatgagttacgtcgtaaaattccaaatgaaacacaggaagatttttatgcacgtattttacaagtgatggctcaaatggggggaggaagtgcaaatgttctttaatctcacatggcgaaacgccaaacggagccgtagcgaaaacctaatttattttctgacaatgataacagccgtagcaatgttttatatagtgctttctcttggacaacaggacgtaatacgttttttaagtgaaattgagagcgacgcagtagaacggttgcttactaatcttttaccgacggtttatctttgtgctttattatttgtgttctttctcgtagtatttgcaaacaaatatcaacttgaatgtcgtagtcgagaactggggctttatttgatgtttggaatgacaaagattaaattatttattcaaataatgacagaggggctaatcacgtcgtttttagctcttttaggagggcttgtatgcggtggctttttatccgaagctataagtcttacaaccgcgcgtttagtagggcatggtatcattacacaccaattaagtttttctgtaagtgccgctattttcacatcgttaggcttcttgattattcagtttgtagcattgtttgttctatgcggaaagctgttccgtaaagagctacatcaacttgtttatggagagatggcgaaaaagcaacgcacagggaatccatatgtaagtttcgtatcgtttgctataggcaccgtaattttgcttgtcgcgtactggattgttgtagagcattttatggctgcgagtggggcaatgctgcttattgccgttttacttggaattatcggaacaattctatttattcgaggacttgcaagaattttgagtatatgggcagcttctataaaacacaaagccacaagaggactttatgtatttactttacggcagttgcatgaaaatgtcgttaataaatatatttcaatcagcgtagcgtccattctgatgatgcttactattatgttaattaccgacggctcagtgcgcataatgtcatatggaagtgaattgacacgaggtacttctgtttatgactttactgtaatgggcaacgaccaaattgttgagaagtatctttccaacgaacaaattcgtccttatgtatcaaatctgaaccgtatggaaataggaaatataaaatccactgcttcggatgggataagttctcctgttgattggtcgaaatttaggaaacaaatcgtgcagcatttacctcaagatgtagtagaccctgccacacaagaagatggtatgtatagttttggctccgaccaacctgctgccttaaaccttttaggtcttattgatactggtagttcttctccttatttgcttcctgtatcttcctataatcggttattggatgccgcgggagaaaaacagattagccttgggaacaatgaagttgtctattatctcaacccagattttttaggtaatgctcaagatgaaacggttacactgttaaatcaaattgcagcagacgcacaggcgaataatgaagcgttgctttctatcaacgaaagaccattttatcttgttccctctgtaccgatgaaagggttgaccgcagatgaaaatatcaagattataactgcattgattgtttcagatgagatatattcagaatttgtaaattcagacacttgtatggtttattggaacttttgtattcctaatgaacttgttgaaacaaaaggtttaatgttaccgattatggaagctcgtgatttgttaaaaccatctggtctatattacgaaagctatcttaataattttgggcgacaattattttatgttatttccggaagttatacaacactatacatgggatttatgtttttgattattgcgtgtgcattacttgccctgcaattcttgacgcaaatgcaaactacaaaatcaaggtatctaacactctctattttaggagcacgacgtgaacaaattaagcgttctatcaaccaacaagtattatggtatttcctgcttcctcttatattagcgtgtatcagcggagcagtagggatatatgccatgcagctatatttatattcaggagcggcacaccttgaacagtcctatcctcttttaattgctatggctgttattgttgttcttgttatggtaatttacggtgtggctgttgctcgaacagctaatcgtgaaataggaaagctcaattacaagcccaattcttaacaggcttataaatattatgggaaaggaggcggacatattggcaaagatagttgtggttgaagatgatgtttatatgcgagaagaactgttgaacttattagaaaaatcgggatatgatacgattggattatcggattttgaaaacgcagtatcagaaatagcagcatattttcccgacttaattttgcttgacatcaatcttccctttcgttcgggttttgaaatatgtaaagagttgaaagctaaacagattggtacggtactcgtattgactgcaagagataaattgcaggacgaactgcacgcattagacttgggggctgatgactatttaacaaaaccttgtaatatgtcacgtttacttgcccgaattaaaaatcttcttcgacgtaaagaagaacaggtacagcaagggttacttgatggaggtggttttttacttgacccgaatacctttacaatttatgtagggaatagctcttaccttatgccaccgaacgaaggaaaaatattacttgctctcttgaaaaatagccctaagattgtttctaaaaaagaattatgcattagactatggggaacagaagaatttatagacgaaaatgcattacaagtaaattttactcggctgcgaaaaacgcttcgtgaatttggtcttgaagaacgtatagaaacagtgcgcggtcaaggctaccgcttgaaagagcaggtgcgcttatgaataagttgaaaatacttttaatctatatttcctctaaccgggtatggattattacacttgcctgtttggacttgttctttatatttcttgcttggttggctaaccctgattattttataaattatgctgcattgataatttttgtgtcatttgccgcacttgctattcctcttgctatatcaatcagaaaacgtaacaaggcagacgctatttttcggcgttttctattagagccggacgataccaacgaatacttactgtgtgaagctgttcccgctgtaatacgccctcttatctgtgaattgggaaaacatttgaggacgcagcaagaatatatcaacgaacagaaaattacagttacagactatgaacactatgttgaaaattgggtgcatgaaatcaaaaaaccactatcccttatgaccttgctactggataatcgaaaagatgaaatgtcccctttggttcatactcgtatgctttatgtacgcgaccatacccgacaggatatagaacaaattctatacttttcaaggcttggggctacacataaggattactcttttgagtcgctttcaattcttggaacttgccgtgaagcagttgaagataatttaacgcttcttgaagaagccggattttctattgaatataccgaaaacgattatcaagtgatttctgacaaaaaaggtctgatgttcattttaggacagataatcagtaatagtgtgaaatatgtgggaaacaaccttgccccacggctcatattttccatagctgatagtatgaatagtgaacagatttctttatctatcaaagacaacggcacaagcataccattgtctgacttaccctttgttttcgacaaggggtttaccggagatacgggcagttaccttagtcgttctacaggtatgggcttataccttgttcagaaaatggcaactgacttatttatcacggtggagcttaaaaacaattcatacggtggaacaaccgtaaccttgacgtttccaaaagtgtaacgtctatttgggaggtagtgaaatgcagttacagaatgaaatagtaaaaaagcacacgccaataaaaagcttgctcattgattggttaattatatttggaacgtatctttttatccgcatattctttgccctctttgggcttcatcagaatattgtcctcttgggctgttgccttgcgatattgccctatctttttggggcgttatatttacagaaatcccacaagcaatgtcaattatggcttgctgcattggctattttaataccgtcggtcgttgaaaaagcagcaatatatttatttggtgcgtacttatacaatttaagaccgataaatgttgtaggagttatggaagcgattaagagtaacgcaccatatacaaacttcattaaaaatcaatcagcacagaatttaataaatctatcatattttaattggacatatattctatgcagtatagctatttctgttttggttatcctgcttttacataagacaaaacaaaaaagtaataaaggataatgagaaatttttgaaattgacatagtatagaacatctgccggacgacggcaaagaaaaaaagccgtcgcaacgcagacaggttttcacgcgcctattctatttcggcggctttgattttcagagccgccgtttctttttatctatctaaattctaacgataactctcctactagataaagacatggcggtatcaaggaggtatcgtcatgtcctttttcctatgccctaatagactgttatcaaaaaaagccattacccgccaacgggttattctggctacatagatgaactcacaaatcatacatatacttttgataattcctttgcgcctgtctgcaatttgcagacgggcgcattttgtattttatcaaaaaactttttcaaaaaatttctaaaaccaacgtccattttgaagtgcgttggtttgagggtttacgaaaggggacatttcaaactccaccgctttcgcggcagcgaaaggaggtgagaacatgaacgagcctattcgtacccaatggcaaatccgttgtgcttttaacggcttttgcaaactggcgttgaagcgagaagctatgaatgcccacagggacacaaagcagcgacaattacgcgaggttactttttctgacctgtcgccactggaagaaaaacagctctacgtctgcgacgagtattttgcagatgatgaagcagaacagtctttcgttgtcggcggcaaagaaattactgcgaagctgcttgccgaagccctgcacagtttgccggaagaaaagcgggaaaccgtactgctgtattatttctttgacatgagcgaacgcgagattgcaaagttttgtaatctgtcaaggacaacggtacagtcccgccggacaagctcaatgaagctgttaaaacgctatttggaggaaaaagcctatgactgcacagattagtaaatcagaacaggacgaacgcggcttgttgccttacccggtaatcatagccgctactaagggcgacccggaagctatgaacattgtcgtacagcattacgaaagctacatagcgtccctgtctatgcgaaagctgcgtgatgagcgcggaaatatctattggggcatagatgaggatatacgcgaccgcttgcgttcgcgtcttatgcgggctgtcctttcattcaaggtttgagataaccacaagcagcgtccccctttccgctgcctgttgacttgaccttacttgctctttgacaaagaaagcgacgcaagataacggcgacgcagtatagggcaaatcggatacgtcctttttgcgttgagccatacggcaggtgcgccatgacgcttttcttctattggagaaagtcgagcgaccaccaccacgccggggaacaagtgtagcggcttgtgggcgacgacacgcactaagggtagacaagcctttatagccatagtccgagcgttaaaagcgtcgcaggcattgggtagagctgccttaacgggcaggggtggaactcccgcgaggttgtgctaacagccgtccgattaaagccccttttactattcacttttcctaatattgaaagggggacgatactatgagtaacgccgacgtgcctatttgggaaaaatacacgcttacgatagatgaagcagctaaatacttccgtatcggagaaaacaagctgcgtaaattagccgaggaaaatcctgccgccgggtgggttattatgaacggcaaccgtattcaaatcaagcgcaaacagtttgaaaaaatgattgataccatagacacaatctgatagtgaaattgagccttgaatgtgctataatgggataagcatatcaaggctctttccgtcttggaaaggagcattgaaaaatgtcaaagaaaagacgtgacagcaaaaatcgagttttgcggtcgggagagagccagagaaaagacggaagatatgcttacaaatatatagatacctttggtaatccgcagtttgtgtatgcgtggaagttagtacctacggacaagacccctgccggaaagcgtgaggatatatccctacgagaaaaggtaaaagagatacagaaagaccttgacgacgggatagacaccataggcaagaaaatgacggtctgccaactttatgcaaagcagatacgccaccggggaaatgtaaggtacaatacgaaaaacggacgcaagcggctgatgaagctactggaagaagataaacttgggggctgcccgattgacagcgtgaagctgtccgacgcgaaagaatgggcaatccgcatgaaagaaaaaggaatttcctataagactatcagtaatgacaagcgttccttgaaagctgccttttacacagcgatacaggacgattgcataaggaaaaatccttttgacttccagttaaacactgtcattgaagatgatacagaaccaaaggttccgctaacaccagcgcaggaagaaagttttttgtcctttgctcaaaatgacaaagtttatcagaagtattatgacgagcttattattttgcttgggacagggcttcgtatctctgaactttgcgggctgaccgatactgacattaactttgagaataggataatcaatgtagaccaccaacttttaagaagtgcggaaacaggatattacattgaaacaccaaaaacgaaaagcggtattcgtcaaattccaatgagcgaaaaagtatatgaagcatttaaccgagtgctgaaacggcgcaggggtgcaaaagctgttactattgacggttacagcaacttccttttcctcaaccgggacggctacccgaaaacagctaccaattatgacggtatgtttagggggcttgcaaagaagtacaacaagtaccatgaggaagctctaccgaaagtaatgacaccgcacaccttacgtcatacgttctgtaccaacatggcaaatgccggaatgaacccgaaagcattacagtacattatgggacattccaacattactatgacgctgaactattacgcacacgctactttcgacagcgcaaaagctgaaatgctgcggatagcagcttagtagtaaatcaaggttttactacttctttactacttttgaaagcaaaaacctaagcggatataaaaatatatgtgagtttcttccgatacgaaaaatgccggaaaagcctgtaaatacgggctataccggcatataagaacttctaaaaagataatcaaaattcatatctaatttttattgaaaaaggggcagacaaaccgtctgccccttgcttttttgtccactttattttgcgtatgattccagccgctgggccagctcgtcgaataggggaaggtaggtgccctctacacgggagcatatctcgatggcaatgttttcgtcatagacgtggctcgtattgttcctgtcctgaagcagcaaaagccatccggcctcgtccgtaataacgccgattttgaacgcccttttcaacacttccctgggggtatcgagccgtatcccctctaaaagctcatattcacggatggtcttccaagcgagctcggtggtgaattcaaaacgctggatgatggagtcgcgcaggaactccctcttgtcttcgtcatgctctgcgttgtagtacacgacggctttttgcagctgcccctgcgcctgggtaagctgctccaatttatgcttgaatttgttcatatataactacaccgtccttttcgatttctttgagcagttctggagaggtgttttttccaatataaacgacgtcaaattccagcagcgtcgggaggttgtcgatatcttcagaaaaaaggcattgccggacaagcggcagcccgtaaacggcaatatcaatatcgctgcgctccgcattgtccccgcgcgcgcgcgagccgaacaatataattttatcaacgctgtattttgccccgaggcccgcaataaggctgaacagctccgtggcggcggaagtgccggcaatttttttcaatcagggttcccccttttttgcgccatttttattaggggaaggagaacccgcaaagcgtcttcagagcaattttggagctcgcgcacaccctcgttcaataccatggggttacttactccgccgttgaaaaagtcaaccaggcttatgccgaaatagtcgcagatatcgatgagggtgtgaagggaaggcagccctttattagacataacagcagacaaataagtaggcgactttcctatttcgcggctcatctgcatttcagatacgcctttctttattcgcagggaagtaattctttccctgataaaatcatctgtattcatgcccaacgcctccttacctttgattaaggtaatcgatataagttttaatatgtgaaagctcttctggcggcaagcttatgagctcctgcctgatttcctcaataaatgcgggggcgtggttgtcaaagtggaagaagtccggcagagtaatcccgaggtattggcagacagcgtttaacatcggcagtgaagggatgcttttgtttttcaataaaaaattaaattctggatgaaagcttaaagatgtcgctgttctttccaatgatgacgacatggtcgtccccgtcaagcacatactcggcggacggcatcggcatcagccgctcaccgcgttttaccgccaggatgttgacatggtactttcggcggatatccgagcttgcgatgctcctccccgcccaggactcatgcacgggaatctccgaaatcgagtattccggcgaaatctctatatagtcgaaaatgttgttcgcgctcatgcggatggcaagcttttcagcgacctctttaatcgggtagacaacctcgtccgcgccgttgcgcagcaaaaacttgcgctggatttcactgtctgcctttgagacgaccttgtttgcgcccatttccttgagcagggatgtaatttcaagcgaggattggaagttctcgccgatggtaacgaagcacacgtcgaaattattgatgccgagcgactgcaaaacagttgggtttgtacagttgcctatctgcgcgtccgtaaagcttgaagcaacacgttcaatgacctccggatccttgtcgacgaccataacctcgttgtccatttggatgagctttccggcaagctggctgccaaaacgccccattccaattaccaaaaatgatttcatttcctttgacgcctcacaattttcaatttgtctgtggataccggcttatatcgataggattaaccaatcataactttttcagtcgggcggttgatggggaccaccgtctttttctgcgcgataatcagcgcgaaggacagccccccgacccttcctgcgaacatcaaaatcataataataattttcgacgccatactcagggaaggcgtaatgccgagcgaaagcccgacggtgccgacggccgaaacaacctcgaacagcacctgcttcatggagaacgggtcaatggtacaaatagtgagcgtagacacaatcacggcgagcagataaatcgttacaatggcgcttgcctggcgcaggacgccctcgtcaagcctgcgcttaaacacggcaatctgcgacgactggcgcgccgacgcgagcgcctcaattatcaaaacggcgagcgtcgtcgtcttgatgccgcccgcggtagagccggggctgccgccgataaacatgagtacaatcgttaaaataccgccgccttcagaaagggaattgaggtccaccgtgttaaagcccgctgtcctcggcgtaactgcctggaatacagaggccatcagcttgcccccggtattcatttcccggaacgcgtggttaaattccataataaagaaagcaatggttgaaacggcaatcagcgcaatcgtcgcggtcagcacgacctttgaatgcagctggagcttgcggaagcggaacctgcagttatacaggtcgctccaaacaaagaacccgataccgccgactactatcagccccgcaaccgtaaaattgaccaacgggtcgtcggcatagcttgtcagggacgaaaacttgtcgaaccgccccattaaatcaaagcccgcgttacagaacgcggaaacagaatggaacaccccgttatatatcccgcggaaaaatcccatatccgggacaaagcggagggataaaagcagcgcgccgattccctcgaatacaaacgtaccaaggattacccgttttatcaggcgcaccgcgccgctgattttcagcgtgccggtcgactgcataataagctttctttcatacagcccgatgtggcgcctaagcactatcgacatcatggaaacaagcgtcatgaatccaatcccgccgacttgaatcaggcatagaatcacaatttgcccaaaaatcgtccagtgcgcaaatgtgtcataaatcaccaggccggttacgcatgtcgccgaggttgccgtataaatggaatttatgtacggcgtccattccccgctgcgtgaggcaatcggcaggcacagcaaaaacgagcccagcaatatgacaagcagaaagctcgccgcgattagctgcacataggatatcttcaacttattgaataacacttgagcacccttcctttgcagcgactgtgcgctcttctatgcgaaaaaaacgggatgattttcttccctgttgcagtctcgactgatattatagcacgccgtcaaaaaaacacaacctgcatcgcataggaatcccttttttcatcacaaagatacattttgcctgcctatttttggttactatgcttacacccccgcagccgccggagcgcacgccctaccaaaaaagccggttccttacaaaaaacatgcgggtacgcccgtaacatgggtgcgcgtatctgtccatcctatgcggcgtcaggataaaaagacaaaaatttgaattcgtgcataagttttccgaaccgttcaataataatgttaaaacaaaaggaggaaatatgaatggaacttaaaggcagcaaaacagaagcaaacctgctcgcagctttttccggcgaatcccaggcaagaaacaaatataccttttatggggccgtcgcaaaaaaggaaggctacgagcaaatcggcgcactctttgaggaaacggcaaacaacgaaaaggagcacgccgagatttggtttaaatacctgcacggcgggcagctcccgaacacgctggacggcctgctcgacgcagccgagggcgagcattacgagtggaccaccatgtataaggagttcgcggatattgcggaagaagagggcttcaaagaaattgcggctatcatgcggttggtagcaaacatcgaaaaggagcatgaggagcggttccgcaagttgcgcgtgaatttgcaggagaacaaagtatttacgcgcgacggcgaacaggtctggctgtgccggaactgcgggcatatccacgtgggcaagtccgcgccgcaggtctgccctgtctgcaagcacaagcagtcctatttcgaaatcaaggctgagaattattgacttttcccctggcctgatgtattgttaaatcgcacaaaacagcgcgccgcccgtgtttttacacgcggcgcgctgattttacataacgaaggattctgcttatgacacgaaaaaaatttattttaccgctcctcatcctctgcgccgcgctggcggcagccatactgctgtgcgcctgttcgtccggcgggcagtcccaggcgcctgacgcggctccatccgcaacagacgcgccaaccgaaccacccacggaaaatcccattcaaaaacagctcgccggtatggcgacggatgaaaaaatcgggcagctcgtcgtcgccggctttgagggctatgaggtggacgaaacgtttgcttccctgataacggacgggcatatcggcggggcaatcctgttttcccgcaatatcagcagcgcgcagcagctctgtgcgcttacaaacggcgtcaaggaaaccgccggaagcggcataccgctgttaatcggcatggacgaggagggcggctcggtgacgcgcctgccggacgacgtgctgagtatgcccggcgcttatacgctggcgcaaagcggcagcaccggttcctgctacaacgggggaatgcagattgcaagccagctaaaagccttcgggctgggcaccggcttttcaccggacctcgatatttggtcgaaccccaataatacggtaatcggcgaacgcgcttacggtacggacgcgcagtccgtcgtgaaatacggtatcgccgcaatgaagggcatgcgcgacggcggcgccgtccctgttgtaaagcatttccccgggcacggagatacggacgcggactcacactacagccttccggtaatttcgaaaacgaaggaagaattgttgtcccaggagctggttcctttcagggaagccataaagcagggcgttcccgctgtcatggcaggccacctgcaatgtacgcagcttgatgaagaataccccgcgagcctgtcgaaaaaaattgttcaggagctgctgcgtgatgagcttgggtttgacggcgtcgccttcacggacgacctgacaatgggcgccgttgctgaaaactacagccttggtaaggcatgtgtactggctgtaaacgccggctgcgacatgctgctggtctgccacgaatatgaaaacgcctctgcggcccttgccgcgctcaaggaggctgtggcagccggcgaaatatcgatggacaggctcgacgaggcggttacaagaatattaaagatgaaggccgactataatataacgtcagcgcctgtggaaacacccgacgtggcagccctaaacgcaaggacgcaggcgttttattaacatagaaaaagccgggttccggcctgggaataaggaaaaggcagggacaacggaaaaagtccctgctttttcttcctgtttttgttgcgggaacactcctgattatggtataattttatttcgatatgcgcggcgcggcgcaccttattttgcaaagggagggcggtacgatgtttacagaaatcggcggcattaaaatcaactacgacgtgcgcggccagggcgaacctgtacttctgctccacggctggggcgcgaacatcaagctgttcgataatttaatgagcctgctggcagccaaataccaggtttttgcgctcgatatgcccggctttggggaaagtatggagccgcctgccccctggtgcgtagacgattatacggactttgtcctcaaattcatagaggaacagggcataaagaaggcgacgctgctgggccactccttcggcggcagggttatcattaaaatgctgagccgcggttccctcccatttgaaccgctgcgcgtaatattggttgacgccgcgggcatcaaaccgaaacgcaagcccaaaaacgtcattaaggtgcgcattttcaagatgtctaaatgggtactggcgctcccgccagtcaaaaagctatatcccgacgcgctcgagcagctgcgcaaaaagaatgggtcggccgattataacgcggcctcccccctgatgcggcagtgccttgtgcgcgttgtcaacgaagatttgacccacctgctcccgaacatcaaggtgcctacccttctggtttggggcgaaaacgataccgacacccctttaaaagacgggcaattaatggaacagcttataccggacgccgggctcgtaacgctgaaaaacgccggccacttttcctttttagagcagcaatttacctttaacagggtaatcgcgtcatttatgaagcttggctaagctttttatgatatttctctccgtgtgagaaaggacggatgatattggataccgctaccattgtcctgctggtgcttgtattgatggcgttccttttgagctggtcgctcgccgcgcgccatttcctgcatatgttccagctcaactcgtacaaaccgaaggtacagctcgactggctgaaaaaaaacctgaacagcctggtccccaaaacattgctggcgctgtttaccgtccctgcgattatcctgtggggcaaaacgggccttgccatcgcgggaattatttatattatccttgcctatttctataagccaaggcaggctaagactccgctcgtgtataccaagcgcattgtccgcatgctgattacaagcggaatcattatgctggtattgcttgccgctgccgtcatcctatggggcggaaggcggattttgttcccagtggtgctgtttgggacgtacgcgctcacacctttgattatcctgcttgccaattttatcaacaagccggtcgaaaaggcaatcaatcatggctttatcaaggaagcgcagcagattcttgcggatatgccggaccttaaaattatcggcattacaggcagctttggaaaaacgagcgtcaagtactacctgacgacgctccttcaagcaaaatacgacgtcctgatgacgccgcagaattacaacacgacgctcggcgtcgtgcgtaccatccgggaaaacctgcgcgctacgcacgaagttttcgtctgcgaaatgggagcgcgcaatgttggggatatcaaagaaatctgcgatttggtgcacccgcagttcggcgtggttacagccgtcggcgagcagcacctggaatcgtttaaaacactcgataacattaaaaagacaaaatttgaactgccaaactccctgccggaaaacggtatggcgtttttaaacggcgacgatgaaaatataaaaagcgtacagtatacgcgcccgcacgtcacctacggcctggacagcggaaacggctatcaggcgtttgatgtcagctcgtcggaaaagggcacttcctttgaagtaaaagcgccgtctggggaaacagcaaaattcacgacgaagctcctgggccgccacaacgtgctcaatattaccggcgccatcgccgtagcgcacacaatgggaatcagccttcaggcgctcgtcccccaggtgaaaaaaattgagggcgtaccgcaccgcttgcagctgatacgaaacggtgaaacccttttaatcgacgacgcgtacaactccaatcccgcgggaacgagggccgcgcttgagacgctcggcttctttgaagcgcatttcaaaattctcgtgacgcccgggatggtggagctcggtgaaaagcaggatgaatataacgaagcctttggcgcacaggctgccaaggtctgcgaccatattatactcgtcggcagaaggcaggcgccgcccattgaaaagggcgtgctctgcgcgggcttcccgaaggagaagctcaccatcgtcgataccatacaggaggcgttttccctgatagcgcagataaacgcacaaggcaaaccgaaggttgcgctgcttgaaaacgatttgcctgataatttttaagctgtattctaatgaagcaagacaggagtgagtggaaatgaaaattaagctggccgttttattcggcggaaagagcgtagagcacgagatttccattatctcggcaattcaggcaatccagtctatgaacacgggaaagtacgatattattccgatttatatcaccaaaaacaacgagatgtacgtcggggaccaaattggggacatcgaggcgtacagggatatccccgcgcttttaaaaagaagccagcgggtcgtgctgatgtgcgacgggaaccgcaccaatatcatgaagttcccgttcaaggcgtttaaaaacaatgtgtacgatacaatcgacgtcgcgtttccaatcgtacatggtacaaacgtggaggacggcgcgctgcaggggtatctccagaccctgaacctaccctttgtcggctgcgatgtcctgtcctccgccgtcggcatggataaatacgtcatgaaaacagtgctcaaggaccagggaatccctgtactcgactgcctttgcttcaacatagcggagtataacggcggtacggataagctgatggaccggattgaaagggaaatcgggtatcccgtcattgtaaagcccgttaacctgggctcgagcgtcggtattaaaaaagccaaggaccgcgcggccctttccgacgcgctggagcttgcgtttgagtttgcgccgaaggtgctcgttgagcgcgcgattgaacagctcaaggaaatcaactgctcggtcgtcggcgactatgaaagcgcacaggcgtccgaatgcgaggagccaataggctctgacgaaattttgagctatactgataaatacttaagcggctcaaagaacgcgaaagccgcgtccggcacgcagggcgcgaagggcggtatgcagagcctgcagcgcaggctgcctgccgatatccccgcacagcagcgggagaaaatcaggtcgcttgccgtcaaaacgttccaggcactcggctgcaacggcgtttcccgcatcgactttatgattgatatggcgtcgggagatttatacgtcaacgaaatcaacaccattcccgggtcgctcgcgttttacctgtgggagccggccggcgtttcctacacgcagctgctcgaccgtatgatttcgcttgcgctcaaacgcaagcgggaaagcgaaagcattcattattcgtttgatacaaacgtactctccggaatcaagctcggcggcgcaaagggcgcaaaaatgtaaaaacgcggcgcgggcagccaagctgcctgcgccttttaaaagggggcgatttggtgatccttacaattaaccgggcccggccctgtgaggcgcgggagcttacggacatttcctttgcgtccaagcagtattggaactatccggaggcctattatatcgtttggaaagacgagcttaccatcacgcccgaatacatagaaaaaaacaaggtattcacagcccgctcagaggaagggcttataggctactgctccgttgcgcaggtggagcaggatttccacgcggggcgcgttttcgtacataagggctggtggcttgaacacatctttattttgccggagcatctgcacaaggggataggcagcaggcttgtaggctttgtgaagggctggtgccgccaaaacgaggttgagatgctctcgattttcagcgacccaaacgcctccggcttttacgataagcttggcgccctgtgccttggggaatacccttcaagcatcgacggcaggaacgtactgctttatgagctggcgatttaaatgtaaaaagtcaaaatgccccgcacagctgtgcggggcattgctttgtcaaaataaattactcggttgcctccgtgcctttctcctcctggacgggcgcgtcctggcccaaatcttcataggagcagcaaacggtgatgtcttccccgtcgtcctcaagcgcggcatactcgtcgtagctcaccttggcctgcgcctcaatcaggcttctgtaacggtcggccgccttctgcatacgggcggaagatttgtcgattgtttcacagcatttcctgttctgctcgctgtcgtccttaccgcgcaggttttcataataatacttgcccaaagcgatatacgaacggttgattaggtctgcctcgttgcgcatgaccatacgcaggcggttctgctgtgcctgaatcttgtttttctctacaacgtattccacagcgtcggatacggcgctgccgataatctccaaaaccttcatgaatcttgtctcccaacattgttgtcttttccgcgccgcagcgcgttctttattgctccggtctttctctggattccttttcctgtgaataatactattattgcagataattcctgtaaggtcaatatctgccggaaagaaatttgccttttccatagtccggctgttccaattccggcgtaatatgttataataataaaacacaatcacaaaaggccccgccttctattatcatatgttttttggcgcgcaaaatgtaccatgcggttataaattccgtcttttttgaaaggatgttttaaatgtctttaagcgaactgaaaactgtaaactgcccgaactgcggcggccacaataaggcggtaatctaccagagcattaacccggcggaggacatgtccctgcggcgggacgtattgaacgacaggctgtttacctacagctgtgtgcactgcgggtatgaggcaaggctttgctatcctgttttatataacgacgtaaaaaagcggtttatggtttattttatcccgaacagcgaaaaaacgctgctgaccgaccgtgtgctggaaaaggaaaacgtcaaaattgccccggtcaaaaaacgtctcgtgacttcctataacgattttaaagaaaaaattatcctgtttgaggccggccttgacgacatggccgcggagcttacgaagctcgcgctcgaggaagccgtacgccggcaggaaaagaggattgtgcgcggcggctacttttctgtttatgacaagtcagaaatcggctttacatattttacccccgataagaacgaaccgtgcgtgcgcaccacaagcatggaggtctataacaagtcgcgcagcattgccgtccgtctgggccgccgggagcggcaggcgcgcgggtttgtaaaaatagaccgccaatgggcggaagaaatcctataccgctaccagaaatatggttttgaagaaaacgcatagaaaaaggaagccgcttaaaagcggcttccttttttacctttttctcccccgattttctgattacccgccagcggttggccccgcaccaaacatggtgtaaggcaattatctaaatactccaatcttgtattcatcataattttacaataaagcttgctctaatttttttatgggcaagataaatattagaccctatacttattgacttttaataattacaagaatataataaaacaaaggtatatatgtaaactttttaatagaatgttaaaaaggagtgtgcataatgtataaaaagaaagtgcggcgtcttatctccttgttcctctccattttggttttggctgcttttccagtcttctctgctgtaactgcctcggcagaggtgcctggcctgcggacaggcgagacctactacctgcgcaacgtcgcaacgggaaagtatatggacgtttacaatcaggaaaaaacgaacggaacaaatatcctgttattcggcttcaacgggcagaccaaccaaagattcacggtggtgcataaagggaacggtatatacaggctgcgccccaagcacgcaagcggctatacgatggatgtaacgggcagcaatgtggatatctggcaggagggaagttacgcctccgaggattttacaattacgcgcaacgtgtcgagccagtaccctggttcatattatataaaatacggcagtaagtacgttatgagcaacgccagtgaaaatagcgttgtcgttgcggatacctctacctacgacagcaaggcgctgtggtcgtttgaaaaggtttcgcatggtgatgcggatatttttagtaacagatttactaatagcgatggaacatttgatactaccggagcggattcccatatttatcagtgtttagaaaacagaatgggatacaatgcaatgcgacttttaaactggactgctgatagtgccttagattacatatgtgctgatgatatagtagtttttaatgggcatggatattcctcaggtggctctcttttattttttaatagttcaggcattcaaacaggtacaattacagcaaataataatatcaatactttacctgcaaataaattaaattccatacgtgtatttattgcctccgcttgtagttcaggaaaaacatcttcttctcatggaaatttaataaattcactttttgcaaaaggagcgcacttttcaattggttggaccgaaacaattgctgttgaaccttcaaaccattggcttaaaagttttttcgacaaaattggtgataagggcgcaaccataaaggatgccatagaccatgcggaattttggtctcattgcggcggactctattataagggggatttgtcacaacaattatcccacctataggcatgtaaacttattaaatcagggaggtattcaccatggaaaaaacaaagaagaattcccgtcatatcctgcggtatgtactgcttgccctgctcgtcgtgtgcgcgggcgctctgtgcggcttttccctctcaagcacggggcaggaaattgtccaggacgcctacggcagatcaatggaattactcaaacaaaactccacaaagcaggttacgttgaacggaaaaagcagcggcacgctcacctataaagagacgatgaaccgcagcgacgcgccggtaaacaggcgcagcgacaattacggcacctacgacgtttacgcggatgaagacggaaacgagtatatatttcttttaaattccgacacattatgtggctacaaggccaaggacgctaccgacattatggattacacgggcaaagccgtgacaaaggacgacgcaaggacaacggccgacgcatacttgcagtccatttttggcgaaaacgcgcaaaaataccaatttgaaagcattgaggtacagcataccgttttctatgtggattactgcttttatttaaacggcgtaaaaacggacgaccaggtaacgctttggattcgcactactgacggcgctgtctccgcatggcacgccttcaaccgcggccggtacgacggatatgcaagccggaacctttcaacaaatgcggccaaggcaaagctggaggagcaaattccgcttgtcaaatcttctgactatgaaattttcgaccagtatatcaccaaaacggacgatggcaggcttgtcatgcattacgatatcgtccatcacgacgacggtatagaaaaaacgcatacctatgaagcccccttagagtaaaggaacttttaaatatgacgataaaaaagaaacgtatcattttggcagccactttgtgtatgttgtttattatatctacgtttgttacattcctcgcgatgaaccattggaagctcccgttcccagacgatgactttacttctgctataaaaattgaatttccaaagggtaccgtctgcgcacaggcagaatttcaaaatcttgcgattgatgggagccagtggcaccaaattaaaatggtttttcccgatcaggcttcggcaaaaaaactttttgaaattgaggagtgggcaaatcaatatcaaagtgataaagacttaaaaatgctgccttgggatttctcggtttgctatcatcaaaacgggaatgacagcgtaacgcggaactaccgaaagactggttgggatgaggagcttgccgattttgttcaatccaacgagcaatatataacagaaaaaattcaggaaataccggaaaaataaattaggtggaaacaatgactgcaaagaaaacgcgcacaatttggattgtgtccttctgcgccctgttcctcatagcggcgggcgttacgtacctatcgctgagctgggataatctttttagcaagacggctcccgcatattctcctatttctttttctgaagatacggtaagcgcacgcgctgaaatcaagtaccttaccgttgataaaattacctatgaaacaataaaaatggatttttcaggtcagacgtccgcaagggagctctatcaaattgagagctgggcaaacaactacgaatataatcctgagcttttgctcatgcggtggaacctttcggtagaatatacccttgaggatggcagcacgctgaagcgctcctaccaaaaatgtggctgggacgaggtgcttgccgattttgtaaaatcacatgaggataacgtaacaaaaatgcgggaatttggttcatgaccaatgcagcccgatgaaaggagccccggcgtacaatcggttgtacgccggggctccttttttctgccttatttaaaataccggacgccgctttcaaagagcttctggtctttttcaaacggaacattttgataaagatttttacccttgcgctcggaatggcccattttgccgaacaccctgccatcagggctggtaatgccctcgatagcgcagacagagccgttcaggttgtacgcgatatcgtctgacggcctgccgttcaagccgacatactgcgtagcgatttggccgttttccatcagggccttgaccgtcccttcgtccgcgacaaaccgcccttcaccgtgcgaaacaggaatggcgaacacgtcgcccgcgtttgcgccgctgagccacggtgatttgaccgacgtgacccgcgtataagccatatgggagatatgcctgcctatggagttaaacgtaagcgtcgggtcggtttccttaagctccgtgattctgccgtacggtacaagccccagcttgataagcgcctggaaaccgttgcagatgccgagcatcagcccgtcgcgctgttcgagcaggtcggtcacagcctgcgcgaccagcgggttacggaaggccgtggcaatgaactttcctgagccgtccggctcatctccgccgctgaagccgccgggcagcataacaatctgcgcctgccttatcattttttccatctgtgcgatggtttgttctatatcgtgcggcgtgaggttctttacgataagcacatccgcctgcgcgcctgccttctcaaacgcgcgcgccgtatcaacctcgcagtttgtaccggggaacgccgggataaacacccggggccttgccgccttgattgcgggagctttctggttcctctgcgtatagcagggtatatcaaacgcaagcttcgggcattccgctttcgttgggaacaccttttcaagctttccggtccatatatcaatcagctcatcgagcgcaagcgttgccccgatgatgtcaatctgcttttccgcggctgtttttccaagcacatactgctgtaccgcggcgtcaagctgcgcgccgtcctccatttcaagcaccaggccgcccgacagcggcgcgaacagctcttccatggtaagcgcgtgattgaatgtaaaaccgatttggttgccaaagcacatcctgcacacagctgcggccgcgccgccctcccgcagtacggatgctgaacggattttcccctcctgcatcagcttataaaccgctttgtacatctccttgagcctgtcccactgcggcatagctgtgtccctgtcctcaggcacgggaacaaaaagaacggcagagcctgcttttttaaattccgcggataccgtttttgatgcttttgtcatcgcaaccgcgaagcttacaagcgtcggcgggacgtcgagctgctcaaaagagccggacatgctgtctttgccgccgatggaaggaatttgaagctccagctgcgccgtcagcgcgccaagcagcgcggcggcaggcttgccccagcgctccggcttatcgtacaggcgctcgaagtattcctggaacgtaaggcgggcgctcaaagggtcggccccgactgcaagcagcttggaaagcgattccaccacggcgtacgctgagccgtggaacgggctccagcgggaaattcccggaatatagccatagctcatagcggtcgcgtcgtctgtttctccctgctcaagcggaatttttgccgccatcgcctcctgcggcgtgagctggtacctgccgccaaacggcatcaggacagtcgccgcgccgatgctcgagtcaaaccgctcggaaaggccaatctgcgagcagacctcgagcctgccaagattttctttaaaggcccgcgccctgtccataccggaaaggcactgcggtacggcgcgcctgtaattctttgtttcatcgggcggcgcgataaccgcgcttgcacgctgcgtcacgccgttggtattcaaaaatgccctgcttaaatcgacaattttatcgccgcgccacgtcatggaaagcctcgggctctccgtcacctgcgcaaccgccgtagcttcaaggttttcttttcctgcaagggcaataaatttttccacgtcttttttatcgagtacgacagccatacgctcctgcgattcggaaatcgcaagctccgtaccgtcgagcccctcgtactttttggtcacgcggtcaaggttgaccgtcaggccgtccgcaagctcgccgattgcgacgcagacgccgcccgcgccgaaatcattgcaccgcttaatcatggtggaaacctcttcgcgccggaacaggcgctggattttgcgctccgtgggcgggttgcccttctgcacctccgcgccgcacgtttcaatcgactgcgccgtgtgcgccttggaagagcctgtcgcgccgccgcagccgtcgcgtccggtcctgccgccgagcaggacgataacgtctcccggaagcggcacctcgcgcacgacgtttttcttcggcgacgcgccgataacagcgccgatttccatgcgctttgcggcatagcccgggtcgtaaagctccgtgacctgtccggtcgcaaggccgatttggttgccgtaggagctatagcctgccgccgcgcccgtcgtgattttgcgggtggggagcttgccgggaatggtgtccttaaacggaaccgtcgggtcgccgctaccagtaacgcgcatcgcctggtatacatacgagcgcccggaaagcgggtcgcggattgccccgccaaggcacgtcgccgcgccgccgaacggttcaatctccgtcgggtggttatgcgtttcgtttttaaactggacgagccatttttccgtcttgccgtcgattgtcaccggcacttcaatggaacaggcgttgatttcctcgctttcgtcaaggtcggggatcagcccgcgctttttcaaaagcttcataccggcaagcgccatatccatcagcgaaacatccctgtccgtgtccttgccgtaaacctcattgcgcgcgtcataataggcgttgagcgcctgttctatcacgccggaaagcgcgcccttttctatatcaatctgctcaagccttgttaaaaatgtggtatggcggcagtggtcggaccagtaggtatcaatcacgcgcagctctgtcacgctcgggtcgcgtttttcctcgtcacggaaataatcgcggcagaagcacaaatcctcaagcgtcatcgcaaagcccatggctccgtaatattcgcgcatctgctcgtccgtaaaagaattaaatccctccacgcgcttgacgtcctccggtacctgcaccgccatatcgaggctttgcggtttttcaagcgaagccacgcgcgattccaccgggttaaccaaatatgcctttaccttttcaaaatcctcgccggtaatatcgcctttcagcgcgaccacctgcgcggaaagcacctgcggacgctctccctgggttaaaagctgtacgcactgcgccgcgctgtctgcgcgctggtcgtactgccccggcaggtattcctttgcgaatacgcgccagccgtcctcaaccggaaaatcctcttcatagacgatatcctggttcggctcggagaatatcgtaccccgcgcgcgcgcaaattcctctttcgacaggccggacacatcgtacctgttgagaaggcgcagcccttctatcgctttgagtcccaggttatggcgcaaatcccatttcatctgggacgcctcaacgtcgaaccccttccttttttccacgaacactctgattacatctgacatgttacgacccccataccgtgttattcactgccgtctattttaccataaaggacggcatatgacaattcagccggaaaaaatttcaaagaatcttttccggcttgttccttattccttatgaaattgctggcgggcaaagactgcctttgcctcttccgcgtttttaagtatctctgcctggagctccttcacgcctggaaactttttttccgggcgcaggaattcaagcaggcgcacctctacctgctcgccataaagctcgccgcagtccacgccgggtacccatgtttcagcaagcggcctgtcggcgccgactgtggggcgcacgccaatattggtcacgccgcagcgcagctccccgccaatctcagcagcggcagcgtatacgccgaatttcggcaggataaatccgtcgggaatcggctggttaaaggtaggcgtctccatcctccttccaagctggttgccgcgcacaaccgtaaagtcaaaggagaacgggcgtcccagcatggcgttcgcgttttgaatatcgccgtttgcaagcgcctgcctgattcgtgtggagctcacaggcgctccgccgtaccgcacgggcgcgaccgtttccacagggatattatcgccgcgcgctatcatctcaagcgcgtgcgcgtcgcccgcgccgccgctgccaaaatggaaattaaacccacagaacagttttcttgcgcacaatttatctatgagcaccttctttacaaattcctgcgggtttaaattcctgacttccgtaaagtcaatgacaaagagcgcccctatgccgagcctttccattgtacgcgccttgcaggtaggggtcatcagcgccagcggcgcttcccccgtcagcaagccctgcgggctgtttgcaaatgtaaaaaccgcgggaacaagcccctcttccttacaggccgccgcgcgggatatcaccgccgcgtgtcccaaatggacgccgtcaaaaaaaccaagcgccacgctcgtgggtgtttccatctgtttgagccttgtatatatctccatggacagctttcgcccccgttattttctctttactcttgtcgtcgttaaagcctgctgatatattttcctgcgcgcttatgccattcacgacgcgctttaccgtgcggagcgccttatacagcggaaccacgaaaggccctttcaggccatctccgcttcgtgttccctcttctatcccctttttagccttccctcgcagccggataaatcccatgccccagcacccgtcgggaaacaggcccgttaggaagcttgtcccgcggcagttttcctgcacacaacgggccgccgatgaaacccagccgttttataagtccagccgccctgtatatattttcttacttttttccgctgaacgtgaagatgtgcttgacctctatgaccatagcaactacagaaataataatcagcgcgatatcaatcatcgcgtaaataaagaacgagccctcaagctgcgccgatgtcgggttattctgtgcggtcaggaaaccgaccacgccccctagcatcctgttaaaggacgcgtctcccccgccggagcccatccccatattaatcagggtcgacagaataaggaacacgatgagcattccaatggacacgccggtaaaaatcggcttagtgggcttgttgataatgcagtaaatcaaaacgcacagcatgatggtcgtcgccgcaatgacaacaatagggttgatgagcatgaataccacctccgcgggtcctctctttttttgttatgcctgcgccgcggtcataccgtgccgcgctttaaaagcagcgcggttttcagcacagccgtctgcgtttttgcgtccggaatttggttttggagcaccatctctaccgcttgttcgagcggtattttttctatgcttaaaaattcatcctcatcaggcgacggctgttcaacactttctacccggcagaaataaagatggatgatttccgcacagtagccaggggaagggtatagctggccgagcgggtaatagctgtgccctacggcgcccgtctcctccagaagctcccgcttcccgttttcaagcgggttctgcccaggctcgagtttgcccgcgggcagctcgagcacaacctcgtgatagggataacggaactgcctgacaaacagcagctcatttttttccgtaagcgcggcaacacaaacgccgccggggtggcctacgacctcgcggcttgctttcctgccgttttccagctctacctcgtcaagtgtgacgttgataatacggccttgaaacacttccctgctctgcagcgtcttttcaaataatttcatataagcttcctccctgctccgggccttgtcattttgggcggccggttcacatatctatataagggtatcgtatcctttcaaacagcgcgtgttttgtcacattttacggaggtgactttttatgacaaaaaacaaaggggtctgtaccggcgccgataacagccaccgcgcccggctttcagcggagctggtgcgccggtaccatttcttaaagcgcggcgtcatcggccaaagccgctgcggccgcgaaattgaagcgtttgcgctgggcagcgaagaggaatccgtcctctactgcggcgcgttccacgggatggagtggattaccagccttctgttatataaatacctcgactgtgtctgcgcggcggcagaccgtggaggctgtgtttctcaaattaagctgacgcgctttttaaagcggcgtggattggtcgtcataccgtgcgtgaacccagatggggtggagatatctctccacggcgcgcagtcggcgggcgcatacgcaaaccttgtcagccatgtttccggcgggaagacggcgcactggcaggcgaacgccgccggtgtcgatttaaaccacaactatgacgcgggctgggaagcgctgcacaaggcggagcaaaaggccggctttgtttcccccggccccacgcggttcggcggaaaacagccggaaagcgaacccgaaacacaggcaatgtgcgccttctgccggaaaaacaatatccaccacgcggtcgccttccacagccagggtgaagaaatctattggcatttcggggaacacacgcccgagcgcgccggcgttatggcgactgttatggcacggagcagcggttataaaaaatcaagtccggaggggcttgctgtcggcggagggttcaaggactggtttatcacggaatttaaacgccccgcctttacggtcgaggtaggcaaaggacgcaaccccctcccccctgaagaccttgggccaatctacgacaagatagaggaaatgctgactttatgccttattatgtgatggcaacggggcacagcccccacattttgtatttattataccaagtaagtaacaataatgcaacgaatttgtaatgtatctgtagttgtctcatgacgaaaaacatggtaatatttgttcagtgaaagaaattcccatccgcttttgattacaagcacacaaggtctgtgtattatattttttggactcttcctaaaattgaactgtaaacgggtttccgtttacagttcttttttgtttaaaacccccggccggggctgtccgcggcgcgggggcgtttttttatgcttcatccttaaaataaatgtcgtaccagaccaggaaaatatatatcgtccaaaccttgcggctgttgtcctctttgccgctgtagtgctcgtcgaggaagcctgtgatgacgtccgggttaaagaatttcttcgccgtatcggaatggaacatttccttcacgatattataatacctttcatccctgagccatacgcgcgtcggcacggggaacccgagcttttccttctgcgccgtttcaggcggcagatggcgcatggcagcctggcgcatggcatactttgtgttcttccggttgaccctgagctttgccggcagggaggaggcaaccttgaacacctctttgtccaaaaatggtacgcgcagctccagggaattcgccatgctcatgcggtcggccttgagcaggatatcgccaaccatccataggttgatgtcgaggtactgcattttcgttacctcgtcgtaatccttcaccctgtcgtaatattttttgcataaatcctgcggcttcgtcacaatggacgggtccttcaggatgcgctttttgtcgtccgcgtcgtacataaacgcgttgccgatgaatttttcctcgattgggcgcgcgccgcgcatgataaacccgcggcccttgatatcgggcagcttttttgcgaaacggtagagcgccatgcgcagcctgtagggcaggagccgctggtaccatttgaaaacgcgcggctcgttgtatacggtatatcctccgaacagctcgtccgcgccctcgccggaaagcacgaccttgaccgattcgcttgcaagcttcgacacaaaataaagcgcgatacaggacgggtcggcaagcggctggtccatgtggtactgcaccttctcaatgctttcccagaattcctctgaggtaatcagctttgtacggtggtctacgccgattttctccgacaaacgctttgcccagcttatttcattgtaacgctccccaaaatcgaacccgacggtaaatgtcttctggtcggcaaaataggtggaaacgtagctcgaatcgacgccgctggataaaaagcagccgacctcgacgtccgatattttatgcgcgttgacagagttttcaaacacctgctcgattttatcgacggcttcttcctccgtcatgctctcgtccggatggaactgcggctcaaaataacgcgtcgtcgtgaccttcccatccttataccacaggtaatggccgggcaaaaggcagtatacgccctcaaaaaacgtttcgggcggcaccacatactggaaggaaaggtaattgtcgagcgcacggtaattaaattttttctcaaagcccgggaattgtaatatgctcttgatttcggaagcgtagacaaagctgtcccccacctgcgtgtagtgcatcggcttaattccaaaaaagtcgcgtgcgataaacagggacttgtcctttttattgtaaatagcaaatccgaacattcccctcagccggtcgagcagcttttctccccactgctcaaagccgtggagcagcacctcgctgtccgtttcggttgaaaaaacgtgcccctgcgcaagaagctcctccctgagctccctgtaattgtaaatctcgccgttaaaggtcaaaacgagcgtttggtcttcgttgtatatcggctggtggccggtgcccaggtcaatgatgctcaggcgcctaaagcccatggagatgccgccgtccaaataaaaaccgttgtcatccggccccctgtgggtgatgacctcggtcatgtttttaatcgtttcatccctgtctatgatttgtcccgtaaatccgcagattccgcacatatcgtatcgctccctttttccgctgtggcaaaacattatgctgtcataattaaaaattctaccacatcgcgtgtgcccttgcaagcgttttaccgcctttatgcaggaatgatacatccctcccaaaaaaagggagccgccgccgcaaaaaatgggcaggcccttttgcggcggcggcttttatcaatactctttatgctttacgaccgcaaaggaaagccacagggaaatcccgagcagcaacacgcaaaaggccgcacaaatcagcaggagcagcggcaggttccccagaattacatcgagccgcgcaaacgccccgctgctgtcaagcgccaatgcatcgagcgcgcccgtcttgcctaagataagcgccgcgccgaccggaagcaataccataagcatcatgacaattcgtcccttttccgtcccaagcttgagcatgacaggcatcagcacagacaagaacaggcagccgatggcagccgcaagcgccagccgcaaaatcgtctccgtatagttgacaggataagccggcaggaacccatgggcgaacatgataaacagaatcatcagtacaagcgagacgccaagcaggataaggccgagcaaatattttcctgcgaccagctttttccgcgtaaccggcatagtaagcgcatatttttcccagccggcacgctcgtcgtacgcaagcgccgttaccggcagcatcattgcaaggataataaaataaagaattgcgaacatctgcatggcggggttgaacagagacgccgtgagtaatattaactcaatcaccaaataaagcattgcggtctttctgagcaccagcaaatcctttaaaaccagtcccttcatcctgcattcctccttcttgcgccgcctttgtcctgcgcggcggtaaaatagagcataatatcctcaatacccgcgcggtcgacaaccaaaccgcccggcattttatcgcgccgcacgagcgcttccacgccgaacatgccgccgcgctttgagacaaccgcgctgtccggcagcttacccagctgctcctgtgtacactttaagacgccgtacatctcgagcaggcggtccttttcctccgaaaaaacaacctttccctgatgcaggaacgtgatatagtcgcaaaccttttccaaatcgcttacgatatgggaggacatcaggatgctgtgctgctcatcctgtataaaatcaagaaacgtatcgagtattttatcccggaccaccgggtccagcccgctggttgcctcgtccaggattaacagcctcgtatcgtgcgaaagtgcgcaggcaatggaaagcttcattttcatcccgcgggaaaaatccttgacgctctttcccagcggcagggaaaattctttgagaaacgccgtatatttttttgtatcccatgttttatagatactgcgcagcacgtttcccacctgctttgctgtcaatatttcgggaaagcagcagtcgtccatgaccacgccgatattttccttgagcgtaccgcttaattcgcccccgctattccccagcagggatatttcgccttcctccctgcctgccagtccgagcaaaagcttgatggtcgtcgattttcccgctccgttttcaccgattaagcccataatacagcctcccggcagggtaaatccaatatggtcgagcgtaaaaccgtcgtaggttttcgtcaggttccttacggcaattgcgtcgttcatatgtcattctccttcgtaaaaaagcttgagcatttctgaaagctccgtttgtgaaaggccgcaccttctggaaagcgcgcaggcctcctgcaaatgctcttcgatttcttttaaatgctgctcccggatgagctccaggtttttttccgcaacaaagctgccctttcccgtgaccgagtaaatgaacccgccgcgctccagctcctcatacgcgcgcttcgtcgttatgacgctgatgcgaagctcccgcgccagaagccgcatcgacggcagcgcatcgccctccttaagcgcaccggaaataataaggtcttttatctgcgagacaatctgctcataaattggagtggccgagctgttgctgatgataatattcatgcgccgcctcctttaacaatattgtatatactcattatatacaatatgacaaccttgtcaagctttttcaaaaattttttctttataaaattttccataaaaacgctcttttatgaatttattcttcctgaaacgtttcgtttccttgaatttcttcataaaactttctatgttgggtcaaaagggcagaacatttcgctgtttttcccttttgtaaacccttttcgtcgacagggaaaacctcgtcgcaggttttcccttgaccctttccagccgagtaaggggctgcgccccttacaaaccccacacgatagaaaacatgctgttcctcgttttatgtctgggggcgtagcacagatactgcgggacgtttctacaccccgcacataaaacgaggagcgaccacatattctacaacgctacgaaggattcttaagggaactctgggttcccttaagtcggcggaaaggtgaacgggcgtcaggatgccgggaacaatgcgccaaatcatgggcttttctagctctggcttcgttattgtcctccgaaggcgcaagccttcgttcgtcctctgcctcgccataaccgataaaagcctcatgatttggttcgaagaagtttgaaaagagaaagctccgccgattgcaagcaaagcgaacaagccatgctggcgcatggcgcgtgagtattgcgcagatagcggtggagatggccttttcaaaccgcattggctccggtaccctgaggccctgaaaagaggaaaaccaccgaaggggttttcctcttttgattaaacatagaatttttatagagaaaacctaagaaatcgaagtgtttcaaaaaaataaacagaaatgaaacagcatgtttcaaaccaaaataaaggcttgtgtccacccgcgataaaaaaccaaagcattgatacaaaaattcatacaatcgtaacacatataaggcggaaatctcttaaaatatggagtggactattgccatttctatcgcgtttttcttgaaaaatggtttaaaaatcaaaggagtgagtgaatctatggttgaggtgaaaaacctcgtaaagcgctacggcaaccagcttgcggtcaacgacgtgagctttaccgtggacagcggcgaaattttaggttttctcggcccgaacggcgcgggaaaatcgaccacgatgaacatcatcacgggctacctgtcctccacttcggggacggttacaatcgacggctgcgagattctggaggatcccgcgggcgcaaaatcgaaaatcggctatctgccggaaatccctcccctgtatatcgacatgacggttcgcaaatacctggagttcatgttcgacctcaaacgggtatcgctcccgaaaaaggagcatattgaagaggtctgtaaggttacaaaaataaacgatgtggaaaacaggcttattaaaaacctgtcgaagggctaccggcagcgcgtcggcctggcacaggcgctgcttgggaacccgcccgttattattttggacgaaccgacggtcggactcgacccgaagcagattatcgagatgcgcgcgctcatcaagggcctggggaaaaagcacaccgtcatcctttcctcccatgtgctgtctgaggtacaggcgacctgcgaccgtgttattgtcatcaaccggggcacgctcgtcgcggattccgccacaaacgagctgtccggcatgcttaccaactcgaataaccttttgctacatattatagggaacgaggtcgccatagcaagcgacctgaaaagcataggcggcgtcacaaaggtggagcgcatccgcagcgtgtcctccgactgcacggaatttattgtgcgtgcggataaggacaaggacgtgcgcaaggacatcttcaacgccatggcgcatggcagccatccaatcgttctgatgaaggacgcggagctttctcttgaagaagcgttcctgcgtctgacgaacgggccagctccggcacagcggaaaggaggcagaaaataatggcggcgatttttaaacgtgaattcacctcattcttcagctcggctatcgcatacgtcgtgctttctgtttactttgtcttttccagcgcgttcatgttctggtactgcctgacatacaacacggcaaacctttcccccatatttacaagcatgctcatcatcacggcgattgtcatcccggtttcgacaatgaagctgttcagcgaagaaaagcgccagaaaaccgaccaggcgctgttgactgccccggtgagcattttccagattgttttcggcaaatacctggcggcattgcttttattcgtttgctgcctcgctatctactttgtatacgcaatcgtaatcgcctgctttgtcacgcccgcatggtcgatgattttctgcaactttatcggctcgtttttaatcggcgctgcgctgattgcggtcggcatgttcatttcttccctgacggacagccaggttgtggcggcagtcgtgagcatggcggcagggcttgttttgacatcctttgtcgatatgctcgcaaatatcattccggtagaggcagtttccggcgtgattacaagtatatctttttctctgcattaccaggatttcgcaagtggtacattcaatattccggacgttgtattctttttgagctttatcgcggttttcctgtttttgactgaccgtgcgcttgaaagaaaacgctggagctaaggaggtggcatagatgaagcataacgacgaaaataaaaagaacctgggccaggtcggcagctcccccgaggaggaggccgcaaacaccccgcaggaaacgccggaggataccggccttcaggcaagcagtgtcgacgccgccacgctggacgcattttcagacgacccggaggaagggctgtccagtgaggaaaatgcgcctgcggacggccagaaacggcgcggtaaaagggaaaagcagaaaaaacagcgttcccacgcgttcaagcacggctggcttgctatattaattacctgcttgttcatcgctgccgccattatcgtaaacgtcattgttggcgtgcttgcggataaattcccgcagatgaacctcgatatgacaggcaccaatatgaacgcgctttccgagaacaccatcgatttcgtcaagacaatcgaccaggacgtggaaattacggtgctcgcctccgaagaggattacaaaaacaacaaccagtatttcctccaggcgaacacgctgttaaagcagtatcccgtttataacgataaaattaaaatcaaatatgtagacctttccgcgaacccggcgtttgcgtccagttatccggatgacgaccttgccgcgggcgattatatcgtaaaatgcggtgaaaggtacagggtgctcacaacgaccgacctgttcaacatgacgaccgaccagcaaacctaccagcagacggtcgagtcgctcaacctggagcctgccgtcacgacggcgctgctgaacgttacctcaaaggaacagacaaaggttacctttatcaacggctttggcgattacaacgcggacgcctacaaaaaactccttgaaagcaataattacgagctcactgaaacgacgctattgaccgaggacatcgacagcgacacgcctgtcgccgtgctgtttgccccgtccgtggacctcgactccgccgcggtacaaaaattaaacgacttcctctcaaacggcggtgattacggcaaaacgcttatttttgtagcaaattcctcttatatggaggacaccccgattctcgattcctttttaaaggaatggggaatggagctttcaaagggttatattgcggaaatggatagcagccatatgccgagtgcaaacaacccctttgcctctgttttcgactttgcaaacgataatttcacggcgggccttaaaaacgcttctatcccaatggcttctgtatatacccgtccggtgaacatcctggatgaaaaaacagccactccgctgtttaagagctcagaacaggccgctctttacccgttcgacgcggatgaaagctacgatattacaaaagaagccaagtctgcgcaaaacgccgcggccatcagcaagcataccggtaacgacgcggaatccgccgtcgtagtttttggttcaaacgcgatgtttgactctacgctgctttccgcaacctcctataataacagcggttatctggtcaatctgacaaacatccaaaccgcccgcggggatgagagcatttccattgaaccgaagaacctgcaggcacaggagctgggtatcctgtcctcacaaattataggtatctcgatgctgctgtttgccatcccgctggctatcttgattattggcatcgtggtatgggcgcgcaggaggcacagataatgaaaaagacgaccagaaatattatcatcgcggcggcggccgtcgccgttttggtaggcgtatttttcctcgtccagctcatcccctcctccaattccggcagcaccggcccgacctatccgaccgatgaaaacggcgagcagtacgctaccgacgcgaagggcaataaaataccctctgaaaaagacaaggacggcaatattttatccgcgggcgtagtggagcttgaaaacaagggcccgctgaagctcaagcaaatcgacgtggaaaacgagtccggtacgttctcgattcttgccgaaacaccgaaaacaacaggctcgggcgatacggacgcgaccggaacctcatcgacaaaatatacgctcgtcggctttgaagacgaagcgcttttcagcggccagccggaggcgattgcaaacgacgccgccaacatgacgacgacgcagattatcgacatcacaggcaaaaaccctgaggaatacgggctcgataagccgcgcgcagtcgttacagccacgttcgaggacggttccaagagcacctataaggtaggaaacgccgcgcctgccgaactcggcacttatctgcagttcggcgacgataaggcaatttacctggtggcaaacgattcggtagacagcttcctgttctcgccgctcgatttaatcagcaaggaaattaccaccgccgcacaggatgaggacaacagcgaaatcaagacccttacccttacaggtacaaattttcccgataaaatcgtaatggagccgaacgacgacgagacaaacgacgcgtattataaaatgaccgctcccaagacacagcctgtcaacgtaacaaacggctcctctgtgacgggtgccatccgcggcctttcagcagataaggtcgcagcggtaaacccgagcggcaagcagctcaagacttttgggcttgataagccggcggctgtcgcacaggcggtatacccggatacaaccataaagctctccgcctccaaggcggacggggacggcaacgtctacctgatggtttcgggcaaagacattgtttaccagatagcctcgagcaaggtcccgtgggcgactatggattacgacagcctcgtttacgaatacgtgagcaagccgaagcttgactttattggctctgtcgatttcagtgcgtcaggaaaaaattacaccttcaaggtaacaaaggaagaaaagaaggacgacacgaccggcagcaccacgacggaatacggcgtaacctgcggcaagactaaggtgaaatcctcttactttgaaaccttcttcgacagcctcacaagcgtccagagggattcctccgccggcagcctcaaggcaagcggtaaaccgctgctgactgttacctaccactacaacaacggtaaaagcgacgatacgctcaaattctacgacgcgggcagccgcaaaattttagtagagaaaaacggctcgccggactgtgtgattttcgaaacgtataccaacaaaattatctctgaccttccgacgattgcggcgggaaaacgcgtcgatccatcgtaacaaaccgtttattaaacaggccgtccgggttaccgggcggcttttctttttggattttccgcgcttaaagtcgtatcttttgcaaccgtgaaaatgttggctttttgaacggtgtccactataataaaacggaacaccgttcaagggggcctgtgaaaaacacttttgatgtaaaggaaaccatcataaaagcggcaactgaattaattgaacagcataacggggacgcggcaaaaatcacctatcctgtattttgagcagttcggcctgtttttcagctacgatatgctgggctatacctttatgccgctgtccacatttttcgcaggcttggctattgatgtgcaaacgaggccgaataagtggctgaaagccctgcttcttatccacggcgtgttttttattacctgttttatcctacccatgctgggattgttttcacccggaatggaaggggcaggctcgataggcaccgctgtccttttattctggtgcgccttttttattcccgttggcgtgctgtccgccctgtatttttcaaaatgcaatgggcaacaggcggctgttttccatcacaccaaattaaagccgtaaagaaaggccgcgggataatcccgcggcctttccgtttatttatatctaactgtattttatgattcctgttcctcaggggcctgttctggctcatccggctccgttgtttccgcggcgccttcaacctcttccgcttccggctcctcttcttcctcatgcggcgccctcgcgagcgtgacaaccttacttccatcctttaccttcataacgacgacgcccttgctcggccttgcgcacaggcggatggaatcagcctggatgcggataatgataccgtcgtcggaaatgatgatgatgtcgtcctccaaatccacgaccttaatcgccgcgacatcgccgtactttttgacatggtagttggtaatacctttaccgcccctcgtctggagcctgtaatcgccgatttcagacagcctgccaaagcccgtttcagatacggtgagcacgtatgcgtccggtctcagggttgacatgccgacaacctcgtcgccgtcgcgcagcgtaatggccttcacgcccctggcgcccctgcccatgggcctgacatccgtctctttaaagcggatggccataccctttttcgtcgctacgagcatttccgcgctgccgtcggtcatcctgacccaggcaagctcgtcgccctcgttgagctccagcgcgataataccgccctttcgcgccgtattgtaagcattgagtgaaatgcgtttgaccagcccgcggcgtgtcaccataataaggtatttgtcttcatcgaactgcggcacgcgaatcatcgacgtaaccctttcgtccccgctgattggcagcaggtttgcaatgttcatacccttcgcggtacggctgccctccggtatttcgtagcatttcagccggtagacgcggcccctgttcgtaaagaaaagaacatagtcatggctgtttataataaacatctcgctcgccgcgtcctcttccctgcgcgccatggcggatactcccctgccgccccgtcgctgggtgtggtacgtatcgactgataagcgtttgacatagccaaagcttgtaagcgtcagcacgcattcctcctgcgggataaggtcctctatatcgacctccccgctgaccgtcatgatttctgtccttctggggtcagcaaaacggttgcgcacggcaagcgcctcgtctttgataattccaagcagcctttcctggtttgcaaggatatctttaaaatctgcaattttttcgcccaaaacgcgcagctcttcctctatctttccgcgctccatgccggtaagctgtcccaggcgcatctggacgattgcctgcgtctgcacatcgtccaggccaaaccgctcagtcaagcgctgtttcgccgtcgacgtgtccttggagctgcggatgatggcaattacctcgtcaataaaatctatcgcaattttcaggccttccagaatatgcgcgcgttcctccgccttgcgaaggtcgtacaccgtgcggcgcgtcacgacgtcaatctggaaatcgatgtaatcctgcagcatttccctgagcgtcagaaccttaggctccccgtttacaatggctagcatgattacgccgaacgtcacctgcatctgtgaaaacgaataaagctggtttaacacaatctgaggggacgcgtcgcgtttgatatcgatttctatatgcatgccttccctgtcggaatggtcctctacgtttgaaatgccctcgatgcgcttatccttcacaaggttcgcaatgctttcaacgagccttgccttatttacctggtagggaagctccgtcacaataattttgaagcgcccgtttttctgctcgacaatctccgcgcgcgcgcggacgataatcttacccctgccggtcgcgtaggcggcacggatgccgctgcgccccataatcatggcgcccgtcgggaaatccggcccctggatatgctgcataatatcctcgagctgcgcctccgggttgtcaatcaggcagcacatcgcgtcgataacctcccccatgttatgcggggggatatttgtcgccatgccgaccgcgataccgctcgagccgttgacaagcaggttcgggaaacgcgacggcagcacggtcggctccttgagcctatcgtcgaagttcggcatgaagtcaaccgtttccttatcgatatccgtgagcatttcgactgccattttactcatttttgcttccgtataacggtaagcggcgggcgggtctccgtcgaccgagccgaagtttccgtggccgtctaccagtgcgtagcgcatagagaaatcctgcgccagcctgacgagcgcgtcgtacacggaagcgtcgccgtgcgggtggtagctgcccagaaccgcgccgaccgtatcggcgcacttcctgtacggcttttccgggccgagccccttctcatacatggtatataaaatacgtctatgtacgggtttcagtccgtcgcggacgtccggcagagcgcgcgatacgataacggacatggaataggccataaacgaatcccgcatctcattattgatatcgacatcgatcatcctggactgcggcataatgatttcgttgttttccaatgaaagacaccctcttcttctaatttgttgcttctttggggtatgaatttatgaaaacggctttttatttgccggtttttacgtattgaccctttgggagggactgctcaaacacctgccggactgcgcctatttcctgctgtgtcagcacgcgcttgggaatcgccgcgccggattcgcaagaggtataaacgtaaaaaaggatatcagtttccacgcatttccacatttgctccggctgagcagtcagagtacatctatccgtttttatttctattccctgctcgtttaaaagaaaagcaatcgataattttttattctccattaattcatactgtttttttgccctttttttcacatctgcccgtaaaacgtatccatcatagtacaggcaaaacgcaattcctaaaaccaatatgaagatattggaaaaggtcatccttgcttgcatcgcaatatccaaaatagaagcgaagatacagcataacccggtaacgataaaaaacagcgaaagctttttctgccgcatcatccgggaaaaaatacaatatgtctcgattacctcttcttcactcaaaagatagcttacgtttatcccatttgccatagagttttccccctgattatgccgcggttataaatttttccacgtaaatttcctttaaataatcccgcagcatagcggcctgttcctgggtacaccgctttttattgataattgtaaacctgccgtctttccgcttgaaaacaaagaacccgttatcctccaggcactctgttacatccgtacggtatatcttcatatattcgtgctcgctcttcaattcaaaatattccttatagaaagcccacgacttttcttctccaatataaaacgccgtatcatatacctttttcattctttccatataattttccggcaggagaatcaaaaacaaaaaggaaaaaagaataagaagcaccaccatcagcatagaaaacacaggaaaaaccgtcacctggcgtgccagaaggctccatacaatctgtaaaaataatattcctgcaagcactgcaaggcaaattccaccggtttttttctttttgccggataataagtaacggtaagctgttttctgcgcgcttagatattcctcttcgcttaaggcttggttttccagcaccagaaacggcttgctgctatcctctatatacatttttatcccccgattgcattttggatggcctcaaaaatccctggcatttccttttttatgttgacggggcggaaggtatttgagcttacaaagccatggcaagtgctgcccacagaaagcagcttttcgtccttatcccgtttaacgctgtattcaaatacgatgcgcgccgccgtaattttactcacccaggtttccaccgtcagctcgtcctcatagtatgcgggcagataatatttacagttaagctctgtcagcggggtcattacacccgtttcctccataatggaatacggcatgcccatgtgtttcataaaatcagttcttccgatttcaaaccagatgggatagaccgaatgatgtacaatccccattttgtctgtctcggcataccgtaccgtaatgctgcttttcgtcttcattttgaccaccggcgtttcataagattacagaaaaatcctttacttttcgtaaggtctcgtcccctttttcacaatgcttttgattttgggaagcattcctccggaaacagcgcgttccggaattgcaaacagctggccgttttccgtgtggaaaatcatcaggctgcccttctgcgaaagcctgcttgtcttgtcaagcgggatttcccacgttgagttctctcctgtaatttctatcatatcttcccgcaccttggcgcggataatatttccctttgcgttttcctttgcgagccttctcagctgtacatagggaacaatccagattgccgcgatgaccagcaggcaaataacggaaaaaatcaaccagttgtaattctggccgaaaatataggaaataaagaaacccgccgccgcgattgccattaaaacggtataaagcacagccctttttccgctggttttaaaaattcccgcgtttttcaggcaggtatacgcttcatctaccgtcaatgaaaaagacaactcttcgcaaaacggttcattttccccataagaggcgttttcccgccgcgtttcttccgccggctgcccgcagtcaagctcagattcataatcattcacggccgtcacctcctgtcaacagatttcatcaaatcatttaaatatcgaggttctgcacatatttcgcgtgccgctcgataaaatcccttctgggttccaccttgtcacccatcaaaattgtaaagatttcatccgccttttccgcgtcggacagctccacgcgcagcattgtcctggaatccgggttcatcgtcgtctcccaaagctgctcagagtccatttcaccaaggcccttataccgctgaatatcggattttccctcgatggtggccaaaatcgcgtcgcgctcctcatccgagtatgcatacaggtgctcttttccctttgttatcctgtaaaggggcggctgtgctatataaacatggccttcgtcaacaagcggcctcataaaacggaagaaaaaagtaagcagaagcgtacggatatgcgagccgtcgacgtcggcatccgccataatgatgaccttgccgtagcgcagcttcgttaaatcgaattcatccccgattccacagccgagcgccgtaatgacaggcatcagcttatcgtttccgtaaaccttatcgagccttgctttttctacattgagcattttaccccaaagcggcagaatcgcctggaaccgcctgtctctcccgcccttggcggagccgcctgcggaatctccctcgacgatataaatttctgtctcttccgggtccctggactggcagtcggctagcttgcccgggagcgccgccgattccatagcggattttctcctgacaaggtcctttgcttttcttgccgcctcgcgcgcgcgggacgcggcgagcgccttttcaaagattgcctttgccgtcgcgggattttcctccaggaacgtctttagcttgtcgcttatcagcttatcgactattgtcctgatttccgtattgcctagctttgccttcgtctgcccttcgaactgggcctccttgagcttaacgctgatgattgccgtcaggccctcacgcacgtcctcaccgctcaggctcttgtcgttgtcctttaaaatattgaacttccttgcgtaatcgttcatcaccctggtcagcgcgcgcttgaagccttcctcatgcgtaccgccgtccgtcgtgtgaatattattggcaaaggataggatacattcgttatagctttcgttatactgcatcgcaatttcgactgcggaggtatcatccggggcgcttgccgcgaaataaatgacctcgggatgtaccaaatcgagcgattttttcttatggatatactccacaaagcttgcgacgccgccctcgtagaggaaattatcctgcttgatatcgtcgcagtcacgctcgtcgcgcagctcgatatgtatacccgcgtttaaaaacgcctgctcgcggaggcgtgtttcaagcacctcaaaatcgtatgcgtctgtctctgaaaaaatttcagggtcggccttaaagacgacctctgtacctttggtttctccctttccgataacctccaggtcggtaacgatttgcccgcgctcatagcgctggaaatatatattttccccatcgcagacctttacctccagccattcggacaatgcgtttacgacggacgcgccgacaccgtgcaggccgcccgatactttatatccgccgccgccgaatttgccgcccgcatgcaggacggtaaagacgaccgtaacggcgggaatccccattttctggttgatgccgacgggtataccgcgtccgttgtcgtacacgcggatgatattgcccggcaggatactgacgtcgatttttgtacagtagcccgcgagcgcctcgtcgattgcgttatccacaatctcatataccagatggtgcaggccgcgcggccctgttgaaccgatatacatgcccgggcgttttcttaccgcctccaggccttccagcacctgtatttcgtcggcgccgtactcactgtcggttttcgtgatttctaaattattatccaaaggaaacaacctcctctaatcatacaaaacgaatcgcgcttattttttctccagttttttataccgcacggtatatgggaacattgggatagtgagcgcaagcagaaaggcggtaacgcccaggcaaacccataccgttatattttcaaataaattaaggcaaataaggttaaccgctaccaatactgcggcggcggcaagcagcagcagcgcgcggccttttttataagataccttgaatttcttcccgcagttatggcaggcgatttcttctttatgcgtattctccctcacctgcctgtaatggtaaaccgcgtggcagtacggacacagcggaagcttcaacatccctttacacatcccagcttttactttttgattccgttggaaaactcagaaatatccaggtaatcctcctccgcggtatttccttcctttacagcgggaattactttcgtagctccgccgtccatatcgtcgtcgattaataaaaattcaccgctgacctgtgaaacgttcggaagtaccttcgtcgacccgctcgcaggcgtaggataataaaacccgccgtcctttttttctttttccggttttgctgaagaagtagtcttaagcgggaccaaccggtaaaaaagcggtgtacaggcataaaatacaaggaagggcagaaatacccacagcataccccacaggttcgtataatcccctataaccagccaaaccgccaagataacagccgatacggctatcgcggcgataattgccgcgcgcagggccttaacaaaatatatcgtcgcatttcttccgcattttttacaggtatgctctcccttttctttttccataattgcggtcacataagaaaccttctgtccgcagtaagggcattttttttctttcatatcccgtccctggcctttcctgatgaaattgaagttttccacataatctctgatatattgtggaaaacttactccggaagaatttttcttctctttaagagtgttgccgttgaaagctggctgatatacacggaactcttcttttttcttttgcttttacataaaataaaggattttggcagctcgtacgttacattgacgacacagccgcccttttccgattttgtcaggaagttccttgtatgcttcgatactgtcgtaatatcgagatcaaaaatccctataatatcctttgtcctgaccaccgtatcctgtccgagatgcaaatacattgcttcaccctatttttttctcttcttttttcatttcttccaccgcgccgtccttaatataaaaaaccctgccgcagtgcagatggccaacagccgttacgtcgcagcaggttataaaaacctgccagccggccgttttattgagcagaaaattctgcctcgataaatcgagctcgcttaacacatcatcgagcagtatgactggcttttctcccgtcagctcctttaagataccggcttccgacagcttgagcgacaaaacagcgcttctctgttgtccttgcgaagcatatatgcgcgccttcatcccattgattaaaatatcgaggtcatccctatgcgggccgtaatttgtacatccggtataaatatcctctttccttgatttctcaagcgctttcttaattttttctgtcagctccggaatcccgtcgctttcgagcgctccatatcccgattgatatgaaataacaagcgcttccttttcttcggatatcccccggtggaactcatatgctttccttttgagcagtccggtatatttcaagcgctcctctgccagcatcccgccggtaacagagagcttttcgtcccagatatcgagcgtatcaagcagttccctgtgacggggaatatccttaagcagcgcgttgcgttggttgagaattttattgtatctggaaaaaagcatggcataccgcggctttagccggcacagcgccccatccaaaaactttctccgttcagacggcccattttttacaagcgtcatatgctccggagaaaaaacgacagaagtacattttcctattaattccgacggagaattttttttcacgccgtttaaaaacgcttcccttttattaggcagaatattaattcttacctcctggattcggtcctccgcataaaaatgcagggagctgcaggcataatcgctttcaaagcctatcagctcgctgtcctttgccccgcgaaaggagcgaacgccgttgaacatccagatacattccagaagattggtctttccctgcgcgttatccccatagatgacattgattccatcagaaacagtcaccgtattatcctttaaattgcggaagccatgaaaggaaagctccttgattatcacttctggcacacctctaacattttatcttcattctgcgccgtatctcccgcacgcatttttttgccgcgctgggtgcatacttccccattgacctgaatttgcccgctttggacaagcagctttgcctggccgcctgtttcggcaatcccgccgaatttcaaaagcgcgtcaagtcgtataaattcattatctatatagattttctcagttttcattatttaacctcatcggcacgacgaggaataaaaatgcgtctccctccgtcggcacgattttcatcggcgtaagcgggccgtttagctccagctttacaatatccgtatctgtatttctcagagcatccagcaaataccggttattaaagccaatttccacatcttctcccttgaccggcgtttttatcgcgtcgtttgctttgccgattgctgtggagcaggaaagcttgatttcttccgcgtttacggtaaagcgtatgggcgactgtattttatctgaggtcaaaagggacattctttccacactgcctatcatatcgcgcgttacaacgcatgcctccgtcttattcccggcgggaatcgttgatttataatcgaggaagtttccttcaatcagccttgtaaagatggaataattttcaatctggaaaaccgcgtgccgctgtcctatcaggatttccgtatttttctcttcgtcagaaacaagcttcagcacctcgctcaaagccttgcccggaacaacgaaccggctgttctgttcacaggcgatggtttccttacgcagcgccatacggtacccgtcaaccgatacaatccgaataacatgctcctcaatatcaaacagggaaccggtatagattggctttgaaatattatcagagacagcaaaaagcgtttgttttatcatatttttgagcaggccgctctgaatggtgagcgtatctgtcttttcaaaagacggcagctccggataatccgccgccgcaataccgacgattttatattctgcctgtccgctgtttatataggtaataaaacggtcgtccgtttccaggcaaactgtttcgtccggcaggcgcctgacaatatcccccagaagctttgcgctgacaacgattgcgccttcatctgtaatatccgcatcgattaccgttgtaataccaatttccaggtcatatccgcacagcgttatctggttattttttgctttgattaaaataccctccagtacaggaagggaggttttggaggatacggccctctgaacattggtaaccgcttcagccaaagcgctttgtgaacaagtcagtttcataaaatcacccatttctaaaaaataaagaaaaagaacagagatagattactagattttagtagtagtagtagggggtgtcaacatgtggaaagaccttattttatggcatgaaaaaggggaaaaccggtttttcccttttgtgggaaggatgtgtacggaatgtggaaaaaaacggatgcgccatttttccatgataacatgttgaccattgtggagtgaatgtggaagaatatgtggaaaactcaaattatctgtcccgtatatttttgacgatatcttccaccgtctctttaattttactgtccttggccatattcttttccacctgctggattgtatagacgattgtggaataatggcggccgccaaattcgtttcctatctgtatcatggaaaggtgggtcagttcgcggacgatatatatggcgatatggcgcgcgtttgaaagatttgcgcggcggttcttgatggagcggatgtcttcgctttttacgccgaaggtacgcgcaacctcgtcaataattttttcaaccgtaagctccggcggggcctcgttgttgagaatatcggaaatagactcctgcgcgcctgcgattgtcggcttttccccgttaagcaaattttttgccttcagtttttttacgacgccttccagctgccggatgttggttttcagctttgtagcgatatattcgcatacctcgtctggaatgttgatatcgagcagctgtgcttttcttttaataatagcgatgcgcgtttcgatgtccggcggctggatatcagcaatcaggccccattcaaagcgtgtgcggaggcgttcctcaagcgttttgatttccttgggcggacggtctgaggtcagtacaatctgttttttgctttcatagagcgtattaaaggtatggaaaaattcctcctgggtagattccttgcctccgataaactgtacgtcgtcgacaagaaggacatccgcgttgcggtatttctggcggaattctttggtttttgccatttggatagattcaatcagctcattggcaaaatcatcgccttttacgtagagaatattgatgttggaatggttctttttaatatcgttgccgattgcgtaaagaagatgggtttttcccagtccggaatgcccatagataaaaagcgggttatatgcgcccgcgggatttgccgcgaccgccagggacgctgcgtgcgcaaatttattggaagagcctacaataaacgtttcaaacgtatattcatagtcggaatcggggctttcagcttcttcttttttatcgcttccggtttctacctcgtctggtaccgtcagcttaattttgatagaggagccgaatacagcttcaaaggcttcctccagaagcgtcaggtagcagcgcgtgagcgtctggcggtggaattcgttcggcgttagaagaatggcctcccccgtatcaaaattcaaatcgattggctctatcctgctaatccatgttttataggcgacgtctgtgattcttgtcttacagtaatcgcagattacctcccaagcctcatgaaaagactccattatcatctctcctttttaaaattacggctaattcaagagattagaaaacggaactatatatagtatatattttacttataatatataaaaatcccactctttcattatctgttctattctatcataaatacgagcttttttcaaactttttctttcaaaaaaagagatagaaaggtttgcttttttcttttttttctgttattttaaaatacaggataaaggaagccctgaaaagaaaggcacaatatcttgtaaaagcataatttagcggcttgtaatgcgtgttttatgtgatttctccctacgaaaaaaagaaaaatttttgttgacgatttcgaattattacgctataatgctatattgcaaggttaacacccgaaaggaggggtctgcatgctgagaacctatcagcccaaaaagcttcataggaaaaaggagcacggcttcaggaagagaatgtccgacagcaacggacgcaaggtattggctcgcaggagagcaaagggcaggaaaaagttgtcttactgagattgaggccacttgaatgtggtctttctttttgttaaggcatgactgccgcaacggcgcaaaagggacaggctttgcatattacgggcgggatggcagaatgaaagaatcttttacattaaaagaaaacagggatttcaggcgcctgtataataggggaaaatcctatgtgtcgcccgtggtggttacttatatttgtaaaaataggaaccagaatgtcaggtacggcattaccaccagtaagaaaataggcaaggcagtgcagcgaaaccggtccagaagagtcattagagccgcattttcacagctgcttccgcaggtgaaaaacggatatgactttgtttttgtcgcaaggacaaaaacgccgtatgtcaaaagcacggaaatattgcgctgtttgaagaaacagctgaaagaggcgggagttttgcaatgaagcgcccgcttatttggcttattaagttttatagaagctgtatttcgccgcatacggcgccaagctgcaagtttacgccgagctgttcccagtatgggctggaagctatcgagcgtttcggcgcctttaagggcggatttatgacaatatggagaatattgcgttgtaaccccttttctaaaggtggatatgaccctgttcccgaaaagaaaaaaagggttaggaagtaataggaggactgcgcaattatgtttgatatttttggttggatcggcagtattttcggctgggttctatggggcgccttttcactggtgcatgattatggccttgccattattatctttacggttgttttgaagctgatcctgttcccggtatcgattaaacagcaaaaatcgatggcggcaaacgccaggctctccggaaagcagcaggagctgcagaaaaagtacggaaacgacaaagcgaagctcaacgaggaaatgagcaagctctatgagagagagggcgtaagcccaatgggcggctgccttacctccctgctccctatgcttttgctcttgggcgtttattatgccgttattaacccgcttaccaatacgatgcatttggcggctgataaggtaacgagcgcagtcagctatttgaatacgctgcctggtattggaacttcgttcaataatttttacggacagattgatattatcaagcttgcgcagacgacgcagggctcttcctatcttacaaattattttgacgcaaatacgattgcacaaatcaaggattttggaaacggcttccattcctttgggctcgacctgttaggccgcccgaacgaaggccttaccattttgataattgtaccgattctctgtcttgtaacgtcggtttttacacagtggttcaccatgaagctgcagggacccatgcagggacagcagggctgtatgaaatggatgcttctgcttatgccgcttctgagcgcatatatcgcttacacagtgcctgccgcggtaggcttttactggattgtttctaccgtgattggttttgcacaaacgctgattttacagaatttctacagcgctggtattatgggcgcgaaagcggaggcgcagcgcgttgcgctgcttgagctggaggaggcaaaggttccttacagctataatccaaagttcgaaaataagggaatcatcaacaggaaaaaacaggggaaaaagaagtaatcgcagtaaatttgccggaattattgcagtcccatactttttcaataaataaaagacgtgtaaaattacttggaggtgtaaaaattgttaaaagaggcaattggggtcggcgaaactgtcgtcgaggcgcaggaagatgcctgcaggcagcttggaattgaagcgcatgaggcggaaattgaagtattgcagatgccggaaaagaagaaattcggtatatttggggggaatccggcaaaggttcgggcatatattgaggtctctccggcgcagagcgcggcggattacctggattccatcctgaaggcaatgggacttaacgacataacaatggaaattaacgaaaccgaggagggcgcggtaatcaacctctccggtgaagaggttggctttgtgattggcagaagaggggaaacgctcgacgcgctgcagtacctctgcggtttagtggcaaaccatgtagataatacatatttccgagttaccattgatacgggcaattaccgtgaaaaacgtgaaaagacgcttgagattttaggaagaaagcttgcgttcaaggcgctcaagacaggtaaaaacgtaccgcttgagccgatgaacccttatgagcgcaggataatccatacggctgtgcagaaggtaaacggcgcaatttcgtggtcggagggtgaaagcatcaaccgccatgttgtaatcgggcttgaccccaaagtacccaggccgcagcgcacaggcggatataataaaaacaggggaccgaaaaggccctacaacggcggcggatataagaaggactataataataacagggactttaaccgcgaccgtggcagccgccccccgcgccagcagcaaggcggccagcctcccgtgaagagggagcccagaaacgagggcggtaatttctcactttatggaaagattgagccgcgcaaggataacaatacggaagaataaagggcttcatcaatttaaaggagcaccgctatgaatcctgcttcttattttttactattcatcgcgctttttgtacccatctttattctctattccgaggagaagaaaagaaaccggattttgcggcgcatccgcaggaaaaagagaggaagcgtacaaatggaccaagagcttttcagcggatttatcggtaaaaattgtatgattaaaacgtctgagaacatccagggcgagattaagcgaatcgaaggcaattggatggaaattgagacgaaatatggaaaacaactgcttaacattgattttattgaaagaatacaggaatatccttttaataaaaagcggtaaaccgaaaacggaagaaacttcaaattttacgggactgcctccttgcagtcccgtttttgttcaaagaaaacagggtgaaagagaatggagcaaaaaacaattgccgcaatagccacagcccagggaacgggcggcatcggcgtaatacgaatatcgggtgagcacgcgtttgccatagccgaaagggtattccggccggccggcagaaaaaaagtaaaggaaatgaaaggctatacggctgcgtacggctctgtttacgacggagaggaaaagctagatgaaggcatactgcttgtattcagggcgccgcacagctatacaggagaggatgtagcggagatttcctgccatggcggcatttatgtgacgaaaagtattctcagggccgtcttttcagcgggcgcctcccccgccgggcctggggaatttacacagcgggccttcataaacggaaagcttggcctgactgaagccgaggcagtaatggatattatcggggcgaaggggaaaaacgccgcgcgcgcggccctttcctgccgtgagggcgcactgagcaggaagatagataagatttgtgaaaagcttacggagacagcggcgcatttaagcgcatgggctgattatcccgaggaggatatcccgcaggtatccgtcgaaacgctttctcaaagcctgaatgcggcaatagcggcattagaagaactactaaaaggatatgatgcgggaaaagcggcttgcgagggcgtagaaaccctgattaccggcaaaccaaacgtcggaaagtccaccctgatgaacctgctcgcgggctgtgaacgctctattgtgacggatattcccgggacaacgcgcgatatgatagaagaaacggttgcgctcggcaatgtaatgctgcgcctgagcgatacggctggactgcgcaacaccgacaatcctgtggaaaaaatcggtgtggagcgtgcaaagcagaaattaaaaagctgtgggttggtgcttgcggtgttcgacaattcatcccccctatcggcggaggacaaggaaatgctgcaccttttagccggaaccccgacgattgctgtcataaataaaacagacttgggcggaaggctcgaaacagaaattatcaaaaagtatgtcgatgaggtggtgtttatctccgcggctaacgcgcagggtatcgataaactagtacaggcagtggaaaaagttaccggaacacaggaatttgacccgtcccaggggattttagcgacagaacggcaaagaaacgcggtaagtaatgcgcttaaagctgtggaagaagctgtttttgccctgcaaagcggaataacgctcgacgcggtaaccgtttcaattgaggaagccgttggaacgctgcttgagctgacaggaaaacgggcgagcgaggaaattgtacaccaggttttttcgagattttgtgtaggaaaataaaaggaggaaagcaaatgggctatccggcaggaaattacgacgtagctgtcgtcggagcaggccatgcgggcatcgaagccgctcttgcggccgcaaggcttggatgcaggacagcagttttcacaatcaatatggatgcggtcggaaactgtccctgcaacccctcgattggtggcacggccaagggacatctcgtgcgtgaaatcgacgccctcggcggcgaaatgggccgtacagccgatgaatgttttctacagatgcgaatgctcaaccggggaaaaggcccggcggtacattccctgcgcgcgcagatagacagaaggaaatacagcgacgtcatgaaacaaaagctggaacgccaggaaaacctggacttgcgccaggctgaaattgtggatatcaggcagacggcgcaggcatgggaattagaaacgcgtatgaacgctgtatttacctgtaaaacagtgataattgcaaccggaacttatttgggaggacgcatttttatcggggatgtttcctttgaaagcgggcctgatggaacctttccggcggcttttcttggaaaggcgcttaaaaacctgggtttatccctgcgcaggtttaaaacagggacaccggcgcgcgtcctgaaaagcagtatcgatttttcagggcttgaggtgcagcccggggacgagccccccatacccttttcatacgatacggaggatttgggcgaaaacaaggtagtttgccacgtcagctggaccaatgacgaaacaaaacggattatcttggaaaatatccaccgctctcccctctacggtggaaaaattgagggaataggcccccgttattgtccgagtatagaggataaaattgtccgtttcgccgataaggagcgccaccagctctttatagagccgtgtgggctgaatacggaggagatgtatttgcaggggatgtcctcttccctgcctgaggatgtacagctcaagttttatcattcgattaaggggttggagaacgcgctgattatgcgccccgcttatgcgattgaatatgactgtgtagaccccttgcagatggatgcttcgcttgaattccgtgattttcccggactttacggcgcgggacagtttaacgggagctcaggctatgaggaggcagccgcacagggcttgatagcaggaatcaacgcggcgcgcaaggtgaaggaaaaagacccggtcatccttgaccgtgcaagctcttatatcggtacgttaattgatgatttggtaacgaagggcgcttctgacccttaccggatgatgacctcgcggtctgaataccgcttgatactgcggcaggacaatgcggatacgcgcctgaccccccttggcagggaaatcggcctgataactgacaaaagatggagccggtttcagaaaaaacaggaattgaaagggctggaatttaagcggctgaaggaaacagtccttccccctaccccacagctcaatgaaattcttgtttcatgtgaaacatcggaggttacaacggggataaggctgattgatttactcaaacgcccgcagctaagctaccaattgctctcgcctgtcgattcgggccggcctgagattgacgggaatatttttgaacagatagaaatagacgtaaaatatgagggctatatcaaacggcagcagagccagattgagcaaatgcgccgtttagaaggcaagaaactgcccgcaaaaatagattacagtggaattacaggcttacgtctggaggcgcaggagaagctaaataaaaccatgcccgccaatatcggccaggcatcacggataagcggagtaagccctgccgatatttcggtgctcctgatatggcttgcgcagcaaaaaaaggaggacggtgaaagcacatgatgcaatggcaggagctgttaagcgaacaggcgcagaagtggggcgtctgcttaagcggaaaacagcttgaaatgtttcgcctttatgccgatttgttaagggaatggaatgaaaaaatcaacctgacagccatcacacagccggaggaggttgcggtcaagcattttctggacagcctctcccctctaaggtttgtggatattccgcaggacgcgtcattaatagatgttgggactggagcgggctttccgggaattccccttttgattgtgcggcctgatatcaggcttaccctgcttgacagccttaataaacgccttttgtttttacaggaggtactgggggcgcttgggctggccgcggaaacggtacatgcccgcgcggaagaagcgggaagaaatccgaaataccgggaaaagtatgacttcgccgtatcgcgcgcggtagcgccgctcaatattttgtttgaatactgcctgccgcttgtaaaaccagagggccggttcatttcaatgaagggcccccaggcggaggaggaaatccattcagcgctgcctgccgcctcattactatcaggaaaaatcgaaaaaacggagaagctctctcttcccgatggaagcggcaggacaattatcataatcaaaaaaaatggatgcaataaaaaaatttatccgcgccatgggtcgaaaattgcaaaaaaaccgctttaggatttatatttcgaccaaattgaaagcaattcaacgcaaacaagcgaaaagagctataaaaatacagccacgctttgacaaacaactgcctttccctatgctattatagtcttgcaatcaggcttgtcctgttgcaaatctaatgcagagggtgaggcagttgattttttcacaaaaagaagagaaccggcttgtggaaatcccgattggaagcatcaggccgaacaaatcgcaaccgcggcgctatttcgcggaggacgagctgtgctcacttgcgcagagcattgcgaacaacggtatcctacagccgctgacggtcagaagaatttcccaaacggagtatgagctgatagccggggaacgcaggctgcgcgcctctgtaatggcgggcctgcaaaaggttccgtgtattgttatgcggtgcagcgacaggcagtcagccgtttacgcactgcttgaaaacctccagcgggcagacttgaatatgtttgaagaggcgcgtgccatcagaaagctgattcttgactgcaatctcacgcaggaacgcgttgcaaagcagcttgggaagaaacagtctacaatcgcaaataagctccggctgcttcggctggacgaggatgagcagcaaaaaattcttgacaacggtttaacggaacgccatgcgcgcgtactgctcaagcttgacggcgagcagagaaaagcagcgttgaaaaaagcggttgccggagggctgaacgtcaagcagacagagcaaatggtagagcacatgctcgaaaacgagctggagggcaagggacatactacgaaaatcattatcaaggatgtccgcatctttatgaacacgctcaacaaagcaatcaataccatgcggctgtctggtatcgacgccaaaactgaaaaaacagaaaacgaagaatacatagaatataatgtaaaaattcctaagacgtctgcatataggcagacaggcggtaatatttccgcataaataacccactgggcagggagctgccccactaaaaatgcttacgactatcccactcatacccatttccttatctgaaccccttataccgaaagccgcgcagtgaatgctgtgcggcttttggtatatctatcaatgtttcatgtgaaacattgctgggagcctgtaagagagataaattaaaaaagtaggagggaagcccttttcaattccttgccgaggtggtataattttaacacatcatggtcagaaggaaagggggattccgttggcaaagattattgcagtcgctaaccagaagggcggcgtggggaaaacgacgacgtcggttaatttggctgctgcgcttggtgtttccggaaaaaagacgctgcttatcgatatcgacccgcagggcaacgcaacgagcggggtcggcgtagacaggcgcggcgttaaattttctacctatcagattctggtcggcggcgcaaaggctgccgcttccatcgtcgatacgggctttcagggactgcatcttatcccgtcaagcctggatttggcggcggctgagatagaaatggcggaatttaagcaccgggagtccatattaaagaatgccgtgtcgccggtgcggggagaatatgactatatcatcatcgactgcccgccgtcgcttgggctgataacgacaaacgcgctttgcttgagcgacagcatcctcgttcctattcaatgcgagtattacgcgctggaggggctttcccagcttatgaatacggtacgccgcgtcaagcgccagtataatgagcggctcgagatggagggcgttctgctcaccatgtacgacggcaggctcaacctgacacagcaggtcgttgaggaagtaaaaaaatacttcccgcgcaaggtgttcgccacggtcataccaaggacggtgcgcctctctgaggcgcccagctttggtaagccgattatgtattttgataaatccagcaagggaagcgcctgttacctgcagcttgcgcaggaaatcctgtcgaagagcagataagaagaaggagaacggtaaatggcaaagaaaaagggcggccttgggaaagggcttaacgcaatttttatggaaaacgaaagcgaagacagcaacagcacggtaacgctgaaaatatctgagattgagccgaacagggcacagccgcggcgcgagtttgacgaaaaggcgcttgcggagctcgccgactccatatcgcagcacggcgtcctgcagccgcttctcgtaaggcccctgctcgacggcggatatcaaatagttgcgggtgaacgccgctggcgcgcaagccgtatggcggggcttacagaggtgcctgtcgtaatacgggagctgtcggatggcgaaacgatggaattggccctgattgagaacctacagcgggaggaccttaccccggtagaagaggcgctggggtatcagcagctgatggacaagtacagcctgacgcaggatgaggtgtcgcgcgcagtcgggaaatcccggccggcggtcgcaaacgcgctgcggctgttaaatctgccggaagaggtgctgtcgcttgttggaaatggaagaatcagcgcggggcacgcaaggacgctgctttcattcaaagacccggacgagctggacaaggcggcgcgccttgtaagcacacaggatatctctgtcagggagctggagcgcctggcaaaaagggcaaacaagaccgcgcaggaaaagacgcctggattgcaggaaaagaagctttcctattatgaagaggtagagcttgcgctcagggaacatttagggcggcgcgtaaaggtcagcggaacaaacgaaaaaggaacgcttgaaattgaattttacggcagggacgatttacacgatttggccctgctgcttgaaaaagaataaataaggagaattatgctatgatagacatcaggttaatcagggagacgccggacgaggtcaaggcgaagattaaaaagagggaaatcaatcttgatcatgtagtagacgagattttggaggtagacgcccgccgcagggaagagatgggcaggcttgaggcgaaaaaagcggagcagaacgcggcaagcaaaaagattccgcagataaaaaagcagggcggcgacgccacggagataatggcgcgcatgaaggagcttgttgcggaaatcaaagagggcagcacgaaggtttccgagcttgaggaaaaacagaatgagctgctgctagcgcttcccaaccttccggatgaggcggtatgcgccggcggcaaggagcgcaatgagccgctccgcttttacggggagaagccggtattcggtttcccgatgaaaaaccacgtggagctttgcgaaagccttgggctgatagattaccagcgcggcgcgaaaattgcgggcgcaggcagctgggtttacaggggatggggcgcgcgtcttgaatgggcgctgctgaatttctttatcaacgagcatattgccgacgggtatgagtttgttttgccgccgcatatgcttaattatgagtgcgggtatgttgccggccagttcccgaaatttggcgacgaggtatattggattgcaaacccaacgagcagcgacaaaaagtttatgctgccgacggcggaaacagcgctcgtaaacctgcaccgcgacgaggtcctgccattggatgagctgccgaggaaatacatcgcctacacaccgtgctaccgcagggaagcgggcagctaccgcagtgaggaacgcggcatgattcgggggcaccagttcaataaagtggaaatggtacagtatactgcgcccgagcagtcggacgaagcgttcgacgagcttgtgggaaaggcggagagaatcgtgcgggagctcgggctgcattaccggctgagcaagctggcggccggcgactgctctttctcgatggcccgtacctacgatatagaggtttggattcccagcatggaaatttacaaggaagtaagctccgcctcaaacgcgagggattaccaggcgcggcgcggcaatgtaaaattcaggggagaggacaaaaaactccatctcgtccatacgctcaacgcgtccggccttgcgaccagcagggtaattccggcaatcgtggagcagtaccagaacgaagacggcagcgttacggtccctgaagtgctgcgcccgtatctcggcattgacataattaaataacggaaataggagggcggcgcttgctgccctttcttctcttgtttttttcacgtgaaaaacctagaaaaaagcagttgacaaacaaggcaaacactgataaaatcggaataatatttatcgggccgacgttgggcccgggacttttcaaaataaaaaacgggaggaaaaacaaatgctgaacacagagtttgagaagaagttcgtcaaagaaggcctgacgttcgacgacgttctgctggttccgggtgaatcgtttgttgagccgcgcggagtcgatatcaaggcgaagcttacgaagagcatcacgctgaacacaccgctgatgaccgcggcaatggacaccgtaacggaaacacgcatggcaatcgccatcgcgagggagggcggcgtcggtatcatccataagaacatgacgattgagcagcaggccgaccaggtcgatagggtaaagcgctcagaaaacggcgttatcgtcaacccgttttatctggcgccggaaaacacagtcaacgacgcaaaccagcttatggcgaagtataagatttccggcgtaccgatttgccgcgaaggaaagctcgtcggcattatcacgaaccgcgatttgcgttttatgacggaatatgattattcactcccgatttcagacgtcatgacaaaggaacaccttgtgacagctcccgttggaacaaggcttgaggacgcgcaggaaattctgcgccagcataaaattgaaaagcttccgattgtcgatgaaaacggttatctgaagggcctcatcacgattaaggatattgaaaagtccatgcagtacccgaactccgcgagagacgcggcgggaaggctcctctgcggcgcggctgtcggcgctacgccggacgtgctcgagcgcgtttccgagctcgtaaagagccaggtagacgtcattgtgctcgacagcgcgcatggccatcaaattaacgtcatcaatacggtaaaacggattaagaaggcatatccaaacgttcagcttgtcgccggcaacgtcgcaacgtctgaaggtacgctcgcgctaatcgacgcgggcgccgactgtgtaaagattggcattggccccggctcaatttgtacgacgcgtgtagtcgccggcattggtgtgccgcagattacagcgatttacgatgctgcttgtgcagcttcaaaatatggaatcccgattatcgcggacggcggcgtcaaatattcgggcgatatcgtaaaggcgcttgcggcgggcggcaacgtagtcatgattggctctcttgtcgcgggctgtgaagaatccccgggagacagcgaaatttaccagggcaggcagtttaaggtttacaggggcatgggcagccttggcgcaatgggcaagggcagccaggaccgttacttccagagcggctttaaaaagtttgtaccggaaggcgtggagggccgcgttccctataagggcgcgctttcagaaaccatttaccagatgataggcggcctgcgcgccggtatgggatataccggctgcaaggatatagaagagcttcatgagaaggcaaaatttgtccggattacgggcgcgggactcaaagaaagccatccgcacgacattcatattacgaaggaagccccgaattattctttctcgttataataactctgtggaaattgtggaaaacactctccgcccagtgcaaagacaggcactgggcggagtttttctattaaaaatgggccttttcagaggggaaaactgcgttttttccacaattctggaccggaattatttttttaaaaacacaaaatatagagttttcaacatggaaaaattcaatatagctgtaataatgtgaacttttataacaattggtagtttacttttcacattttccacagtttcatgtggaaaactcattttgcagagaggaaaaaccattgaaaaagatgcttttatagaaaaaatccacatctgttagatgtggattttaggcggcgaaggaaaccaaaataggttaccgcgttatatacgtgctggcttattaacaaataaaaggggggttatacagtagaaccggcccttgcgtaataatccgtatccagtatgcttaggtggtcgatatttctgaatacgccgtccttgaggatttcgcaccgcgccgtcccttcataaacgaagccgcatttttccatcacgcggaaggaggcacggttttccgacatacaacggccggatatccgcttgagctttaacatatcgaatccatagcgaaggattgcttcaaggcattctgtagcgcagcctgcgttccagcaggatggattgataaaatagcatatttcggcacgccggttttcaggagaaatgtttatcagcccgatattgccaatataagcgccgttcgttttgctgaaaataccaaattcaaacccggtgccatgctttgcgctgtttttcaggaaccggaaccaccagtccacacgcccgcggggataaggatgcggaatcgcgtaggtggtatcatatattcttttttgagaaacgacttcccaaacggccgcggcgtcactgtgctcgtatggccggatataaaagcgcctcgtctgaaacaaaggaaacatgcagcgcctccttttggcgaaataatctttgaattgtaaggttatggagccttgtaatatcagcagtatgaaaaccatgtcagcttttgataaaaacgcgttctttttcataaaactgaaattttagcagagaatagggaatgggagaggaaaaacaaaaaactgttgacaaatgtatttgcttataatataataattcttgctcactgcgagcatagatggcggaatagctcagctggctagagcattcggttcatacccgaagtgtcgtaggttcaagtcctatttccgctaccatacggcccggtggtcaaacggttaagacaccgccctttcacggcggtaatacgagttcgattctcgtccgggtcaccacatcggagcaaagtgcgctttgctccgattttttttgtaaaaatataggagcgttatctgcttcccataccctgtaaaccattacggtttgcggggcgttttaattcaacacccgttttttataaggatagaacgggaaggggagagtgggttaaggctcctttttctggtcaaaattgagcgtaagccggccctgctccgggacaaaatgcctgacccgtacgcctgctgcttgaaataaacgctttgaagcgcgcacgttgtccagctctgcgtatttgtcgtcaagataaatgacctcgcggatgccggcctggataattgctttggcgcagccgctgcacgggaatagcgaaacataaatttttgcgccgtttaaattcctgccctgcgcgccgacgattgcgttgagctccgcacacatgacataagaatattttgtgtcaaaatcgcttccctcgcgctcccatggaaaatcttcatcccggcatccgcggggcaggccgttatagccgctcgacaggatgatattttctggataaccatgcagccctgtgcttacgatgcaggcgccgacctgggtatgcgggtccttgctgcgctgtgcggaaagaagggcgattcccataaaataggtatcccaggaaatatagtccatccgtttcatattgaaacctcttttctaagacttatcttaaacagaaatgcttatattaaatgaatgcagcccgacaaagcaaatatatgcgcccggcaggcctgaaataccggcagcggtttttacacagtggtaaggcagattaggggcaaggttttggaacacactgttaaccaattcaggaaaggcagcggcttgtatgaaccgtaataataagcgtcctccgcttaaaattattctacccctatattttagcataaaaagtcgaaaaataggatatttgattaggcaggaaaggaaattttatcctgacagaaaaaagcggcgaaggtttttccatttagaacacattataattttatcacggtttgggcaaaaagagttggtaggagaaatattttctcctaaataagaggataacaattaaaacgggcaagaaaaaagtcccgcacagcggaactttaaagttttaacagattcattggaaaagaaaaggttacggtgcctgagccggtgatatacagaaggttatctatattataaggggcctttctgaatttgacgccccgttataaagggaaactccataaatcggcaagtattttcaattgtacatacgcaacagccaggggaaccgcggcggtgaacagatcaaatagggtcgattgatacttgccgccgggcaatcgtgccagcagtacaaacggcctgccaaatgcgtccttatggaactggcagcctgaaaacatgaacataaacgaggcgagcaggttacacagcgcagacaagaagaaggtcggaacagatattatctttatccatccaaatataagatgcagcaacagcgctgtgggataaaggactgtaaaaacccggttaataaaatagattgctcccaggccgtatttttcatggagcgcctgataccaccagaagtttgcctttccctttttcagctttcttatcatggttttactgattcttttttgccgcagccaaatatcggctgcgccgcggaacaaggcgtaataaagaggcgggaggcataaaagcagaagatataagaaataaaaggaaaccatgcgtttgtcaaacagagcggaaaattcgacgtcaaacagcggcaaaaggctcgcggcgaccatagcggcgccgaccgtaaaggacagcattgtcaaaagatggccaagatattgttccatccacgcggcggcgatattatatagcccgattccaaaaacaaacgcgcccgcaaatccaagcatcagccaggggctgtttggcgcatggaaaacaccgccggcaattaccaaataaagaaagggcggcagcagcattgaaatcgccgcgcaggtcgttatgattctatattcgcgcggatgttccgcccgaaaccgggtacttccggctggcgaaaaaaaacgcagcccgccctttggccatgttttattgaattttggcttgagttggtttcccacgcgaaccaccctcctataaaaacctttcgttctatcatagcatagatttacgcgggaatcaaaaaagccaggccggatattagccatccaaaacggcgcgttggccggggagcaaagccggctgttcctacatgctgcgccagatataaaaaacggttgaaaaaggcctccgcaaggagcgcgcgaaatgcaaccgccgtttattatggataggtgatgaaaaacctgttttatttatttgcagtgtgcgcggtgtacttctccttattatgaaaggtttttatgcgtttttgtttgttttggtacattttttcatcggcacgccaaatcagctggtcaatgatgtccgcctggtcatgctcatatttttcatatcctgcgctaaccgaaacctggtacggcaaatcctttgataaaatagaaaacaaaagaagtcgactgtataaacaatcgacttcttttgttttttgtggtgccgctgaccggacttgaaccggtacggagtcgcccccgagggattttcttactactctatgttgccatagccgcccgtattgggcgttgtagtctggactttatcttcaccttagatattttccttaggtgcgcgccgtcaagtctctacacgttcctagagggggagccccttaggcttcgctcggtattgtcccctatgggggagttccaccgaatttgacgcgattcacacggacagtttcccgttccggtgctcaaattctaagtcccttgtgtctgcctattccaccacagcggcatatctttgcagccatatccaaggattgacaacgggtattatagcatgaggattaggaaaaatcaagacgaaacccgccggcgggcaaaaaacaaccgccggcgggaacggccaacctggttttttcaataaacaaaaagaaaaaccgttcgcgttattccttcgcaaggaaggccgcgccgataatgccggcgtcattgccgagctccgccgtacagataaccgtctgtttgtcgttgtgcttggtatagcgttcctgctctaccagcgtgcgcaggggggagagcagcgtctcgccctcgcggctgatgccgccgccgatacatagtacatccggctggaatatattgattgcgttgacgataccgcacgcaaggtaggaaatatacttttccacaaccgcggttcctgcggcgtcgcccgcgcgcatcgcgttaaaggcggtcaggccgcttaccttgttcaggtcgccgtttacctgcttaagcatataggacgaatcaggccgttcggataagattgcctccttcgtcatattgattagcccggtggcggaagaatacgtttcccagcagccttttcttccgcaggtgcagtcccttccgttatatacgataaccatatggcccatctccgcgcccgcatagttggagccgctgtaaattttcccattgataataatgcccgcgcctacgccagtgccgagcgtaatcgcgatagcgtttgtagctcccttcgcggcgcccgccaggaactcgccatacgcagccgcgttcgcgtcgttttctatcaagacctttttgcccaggcgctcctccatcattttgacgatttcccagttatgcaggaacagattcgtggaaaactcaacaattccggtttttggattgacagcgcccggcacgccgattccgacaacctcaatatcatccatcgtcagctttgcctttttcagcgcgcgttgggccatcagcgccatagaatcacaaatttcagattcagggcggggcacggcggttttacagtccgccttcgcaacaattttatacttttcatcgacgacgccggcgacaatgtttgtaccgcccaaatcgatacccagataatacataaatgaacctcctgcatgttaaatgttcttacagcaccgcagggaaccatccccgggaatcatgtgacaacattatagcatatcgtaaatttgttataaagagcttgaataaaaaaattattaatttatattcttttgctaatttagtgtaccccaaaatagaacaattgaacagctgttttaacgccgcgcgcaaataccggttgcgtaatttgtggaatattcagcggcttccggtgcggtatgccattcacagccgacgcagggcaaatcattggcaaagacggaatgactccctttcgtgttatcattcaaaaagggaaccatgattttatttttttctcggtttctccatctaatacgctaagcaggcatgattcaggccacaaaaaagggggctgaaagcatgtcgctttcttttcctatatataaggaaaagaaaagacggctcttgtccatttatattcctgtacatgggataaaatgaaaaaaatttaaaaatagggaacgagtatttaagagattagacgagtaaatggaagatttaaagagataataaacagataaattaaattcatagcaaaaaagtgttgacttggaaagggcgctgtgctattatctattttgcagctcagcgcccggcgggaaaccgcggcacgggcggcttgaagatacaaagaacaggaggaataagcatgtccacatatatggcgaaaaaaggcgaagtcgagcgcaagtggtatgtaatcgatgcggcgggcaagccccttggccgtgtagcagcccaggctgccaccttgctcagaggcaaaaacaagcccacgtttaccccgcatgtcgactgcggcgaccatgttatcatcatcaactgcacggacgttgttttaaccggaaaaaagctcacacagaagtactactaccgccacacgggttatatcggccatcttaaggcgaccagatacgacaccctcatggcgcagaagcctgaaaaggcgatggagcttgcggtcaagggaatgattccgtcaaataccatcggcagggcggctatgctcaggctgaaggtttacgcaggctccgagcataagcaccaggcgcagaagcctgaaattttagattaaggaaggaggcactttacatgtacgataaagcaccctatttttacggcacaggcagaaggaaaagctccgttgccagagtcagactctatcagggaacaggtaaaatcaccattaacgacagggatatcgacgattatttcggtctggaaacattaaagctgattgtaagacagcctcttgccttgaccgagacaggcgagaagttcgacgtagtctgcagagtagcgggcggcggcgtaacaggccaggcgggcgcaatccgccacggtatctccagggcgctgctccagtatgacagcgaggctctgagaggcaaactgaaaaaagccgggttcctcactcgtgacccgagaatgaaggaacgtaagaaatacggtcttaaggcggcccgtagggcgccgcagttctccaagagataatctgggacgggaaagagattatttcagcggcgcattcttaccgccgtttggcgaactgaatatatataagcttgaaatagaaagaattcacatcaacgaacggaaaagaagaggcgctttcggcatgggtccgaaagcgccctcttctttttttgggcctgttttcccgagagccctgtgacaggtttgattcatccgttacaccgatgttacaaatcatttgctaaccttatcaggagaggaattaattaggacgtttttttggaatatgctttctgccccacgcgtataatttttcaaaaaaaggaaaaacgaacatttatttgttttggttttttcttttaaaaacgacaaaatacgtgccaaaaatggctttgtaatgggatttttagactgcccctgctattcattttatgcggtaaagattcatctgatacacgaatgtaatgaatggttaccggtttgtaaccgttcttttttcacattttgcacagaaaaagaaaactaatttctaattaagaaaaataaaacctcgaatttcttgaaatctttcacaaaaatttgcccttccgtcttttttcgtcaaaaaaattttggagaattatacaaaaaaacagttgcttctctgtttgacatcacgaaagcacgctcatataatgcaaagcagtaggacaaataccgataagtcctttgccggctggtaaatccactctttctgaaaaagaaggaatcaggttggaccggcaaatacaagacgataaggagttctatatttttatgtttattaccgctatggacagcaaaagtaagaaagcggcttactttaaaagggcgctcgcgcttattttaatgagcctgattttcattacctcagccttttcagtagcagcattaagcagaacagcagtgattacagcagacggtaaggaaatgaccgtaacgacaatgagcacgaatacggacgatatactggagcaggcaggcattgacctctccctgtatgacgaggttgtccgtactgaaaatgaaaacaacagtatttatattgtagtaaacagggcgttccctgtttcccttacggcagacggcatgattcagtatattacgatgacgggcggtaccgtcgcggacgtactggaaaaggcgggcgttgcgctcgacgagaaagtggccgttacgcctgacgcagcccaagaggttacggcggagacaaaaattgtcgtaagcccgaagattgccgtttcggtgacagccgacggaaaaacaaagaatggctatgtggcgcagggcgttactgttgaggcagcaatcgcggcgctcggcatagagctttctaaaaacgataaggtaagcgaaccgcttgaggcacgcgctgcggacggcatgaaaataacgattggccgtgttgcgtataagaccgttaccaaaacggaaaaaatcgcttacagcgtgaatgaaacaaagacgaacgacctctatgagggcgagacaaaggtaacgaagcagggtgtggacggcaaacagcagcttaccgtgaagcagcagctccttgacggcaaggtcgtggaggagaaggttactgcaaagaaggtgcttgaaaagcccgtcgcgcaggaggttctcgtcggaacaaagaaaaaagccgtacagcagagctccggcgccggcgtccccgtttcggcaagcaatggcgtcctctatgacgcaaacggcaaccaggtttcctactcaaatgtactttacggttccgggacagcttactatgcgcctccgggcgcgctgaccgcgactggcgtccccgcttatgtaggcggcgtggcggttaacccgaacatcatcccctatgggacaaagatgtatattgtcagcgaggatggctttgtatacggctatgcgacggcaatcgatacgggcggagcgctgatggacggttccgcgattgtcgatgtttattatccgacctacgacgactgcgtcgtgttcggcagaaggaacgtgtatgtttatatcctcagctaatcactgaaactgcttaatggaaaaaagtaaaaaagaggcgatatgttcgcctctttttcttttttctattgaattcattttgcttttggggtataatatccaataatcgcgcgctgtaattatgaacgaatacttcagccggcgcaaaaactttgaaaaagaaaacggcagacgccgtttgaaaggaatcaaaagcatgaaaaaaatattagcagtttgcctggtgattataaccgccctttcccttgcggcctgcgcgcaggccccgcagagcaagagcgagacggtgaaaatcaaggatatggataaaaaatacggattgacgcagctgtgcgccgacctgaacaagaaagaatatatccccgaagagggaacaaaaatggaagctcaggtaatcggcgccgtcacaggctaccgcttcacgacgaaggtcaaggattcaaacgttaccatcgagctgtatgaatttgataaggacaagctcaatgaggacgcgcaaaaagtcatcagtgaagtcaaggaaaagggatatttcaatatgctcggctatcaggatgtcccggcggagctttccgataatgaaaagtatatgattatttaccgcgacgacaaggcgggcggcgacaatccggaacaggaaaataaggagcgcaaggaagccgtcatgaagattttcaacagcgcaaaataaatataacgaagccccggaacttttccggggcttttttaatgaaattctgctcgatagcccaagccttcaaccagccccccctttatccccaaaacatggggaagaaacggcgcgcctttccatccgggcctccctgctgctattttttgtacttataaaaaagcgtgttacgccagcagctgggccagccccacaatcaaaggcatggtagccagcgaaaacagtgtggacagggaaacgaggttgaccgaaagggaggtatccctgtcaaacttcgccgcaaacattgtcgtcgcggcggcaataggcgcggctgcggcaatgacacaagcaaccagcacgacgccgcgtatctggaacaggtacatgaaaaagagcgcaagcagcgggatggcaacgagccgaagggcaattgcggcatatgcctttttatcgcgcagcgcctcgcggagattcgtacgcgacaggtaaaatccaatgataatcatgggcagcggcgtgttgagcgccgccatatacgaaaccggcattgacagcacctccggcagatggacggagaataaaaacagggccattccggcggccacgccgattacgccggggtttaaaagcagatgcttcggcgaaagcgtctttttgtccccgctcatggtcagcagaccatagctccacaaaatcaggttgaaaaccgcaacgaaggccgccccgtagaacacgccgtccgccccgagcagcgcagcctgcaggggaatcgacatgaagccgcagtttgaaaagacagtgccgaaccgcagaacacagcggcgggaaatatctttatcccgaaagacaaggaacgcgatgacgatagaaacggcgtgaataagcacggcgcacagggcggttatgccaaggttagtgagcagctccggctcaaaatcacgctgaaacgcgtcgattaccacacagggggtgacaaaatacagcacgatgttcgtcaggtgctttgcggtgttccgcgtcaaaaaccgtacttttccacaaatgacgcccacgacaatcaaaataaacaaaatcagcacctgctgccctaccatcaaaaagttctccaacatgtagcaatactccctatttttttatcggaaagaatatccctgcggcggcagcaggcgaaagcaactggaaaaacatttatattccaatctgctttatccttccgcgcgccttattgcgcgccaataaacagaaacagggacggcgctttaccgtccctgccccaaaagcgtgacagatatatcgacgcttgtttattttagcttgtatccgcagcgctcgcaataaatatcttcttcgcgaacttgctggccgcagccaggacaaaaagccttattttcgccagacgcctgttggccggcaggctccgccgcgttttcggcgggctgttccggcttagcttcctcattcacaccctcaggagttacagcaggggctggcgggaacggcgggacgggccgctgtgcctgtgcgtagggattaacggcctgctgctgataaggattgccggacggcggcggtacaggagcgccggaaacgggctggaatgaaggcggcgccatagggggctgtacggactgcagatgatttttaatatatttatcatagccgagagaaagcgttccaagtaaaataataaaaacagcgttggacagcatgttaataaacgacaggagggcaaaaacagaaaagctggaggccgaatatgaataaaatccgtaggtgtctattccaaacattgcaaccagggatgaaaacgccccaaaacaggtcaaaataccgagaacgatgttcagaacgccaaagagctttgcgcccttgacgcctacctgcggtgtatcgattgtctttttaacggagccgaccaggcgtaccgcggaaatgctccacatgagcataagcgcgaatacggcggcaaagataaggaggaagacaatcataacgccgatggcaatggaagcgtcggtagaggaatagtacccgctgccaaaattataatggaagttggtcccggctgaggaaccaaacgcaaccatcataaacgcgatgatgataacgaaaagcgcaaggcaggcaacaatacagatgaataccagctgaatgatggcgaatacctgtaaaatcgtaaatcctgcgcgcgggtttgcgttcggcattgggtttttcgatttgaagtagataatcaggaacgccgcgacaaacagcccggaaataagaaaggagaagatagcggagccgtagctcccgctgttcatcgtatcctgcaaaatcctgagatagtcgtttaaatcgctgttctgtccgcccaaaatactgttgtccagcaagttgcttgccgcaggcgtgagaaaaaagatggaaataaactcgaccgccgcaagaatagcggcaaagataccagccgcaagaacagatttcttgcggaagtagcccttaacgagggcaaggttgttttgaaccggaatctgcatgttcatctggttctggtaaggcgtgttatacataatgttatcctccatttccctaattgattttattttataagagaatggagcgaattacaatagcatttcaaaatttttggattcaatgttcttatttaactgcaaaagcggtgcgaaccgattaccgtcagcacagggcgggaaaaaatccatttgtttgtagattttgcgggattataatagtaaatcgcgccgccgctcgggtcccagccgttgatggcgtcccgcgcggcctttttcgctgactcataaacgggggcgttgacctggccgtccgtcaggcaggaaaatgcgcccggctgataaataacgccggaaagcgtattaggaaacgacgggtgcgcaatcctgttgaggatgaccgcgccgacggcgacctgcccttcatagggctcgcccctggcttccgcggaaataatacgcgccagcagtgaaatttcagagtctgtgtatttcccgctcgtcccgcccgaggatttgattcccagcgcggcaagcgtttttgagccggcgattccgtccgcgtcaaggcccttggctttctggaactgaattacggcgttttttgttccgcttccataaataccgtcaatgtttcctttataatagccaagctcctgcagctttgtttggatggaggtgacctcctccccagtagagccgtatttcgacagggcggtaacgttgtaaagctgccagcaggcaagcagcgtcacgaaaaacaaaaacagcgcaagcatgcgcaccatgcggttgtgcctgaaattcatatgcattcctcttttttctttttcttccctatcatttttaccgggaaactccgtgttatgcttgcaatgtcttcaaattagaagccttttctttattataaagaatatggcgtggcgtttttctgcccgaatagcggcaatagtgcctctccttaaaatttccactatatatagcggttgacaaaagcggattgctttgatagaatagaaaagctgtcgcaaacagccggtttattttagtcagggaaatttttattgagaaaaaataaaaaaagccttgacaacagcgtttggcagatgtataataactaacgctgtcgcaaaagcggatagcttgtcacagggaagagaaatcctcccgaaagccaggtgcaatgccggatagggcagtaacaggaccttgaaaattaaacaacgcaatcatagtaaagaaacccgtaatactttgagtggggaagcgaaagcagtactcacaaaaagaagagaggcgaaactctaaaaaagacgcggtgaagaaaacacggaaaaattgaacgatacgtcaagtgtcgaaatgagcatcaaagctctggaatcggtagtaacccgaaagggttaatatacaaattttagagagtttgatcctggctcaggacgaacgctggcggcgtgcctaacacatgcaagtcgaacggagttatttaaatagaacccttcggggtgacgttttaataacttagtggcggacgggtgagtaacgcgtgagtaacctgcctttcagagggggataacgtcctgaaaaggacgctaataccgcatgatatatttgtgccgcatggtatggatatcaaaggagcaatccgctggaagatggactcgcgtccgattagctagttggaggggtaacggcccaccaaggcgacgatcggtagccggactgagaggttgaacggccacattgggactgagacacggcccagactcctacgggaggcagcagtgggggatattgcgcaatgggggaaaccctgacgcagcaacgccgcgtgaaggaagaaggttttcggattgtaaacttcttttctaagggacgaagaagtgacggtaccttaggaataagctccggctaactacgtgccagcagccgcggtaatacgtagggagcaagcgttgtccggatttactgggtgtaaagggtgcgtaggcggcaatgcaagtcagatgtgaaatgcacgggctcaacccgtgagctgcatttgaaactgtgttgcttgagtgaggtagaggcaggcggaattcccggtgtagcggtgaaatgcgtagagatcgggaggaacaccagtggcgaaggcggcctgctgggccttaactgacgctgatgcacgaaagcgtgggtagcaaacaggattagataccctggtagtccacgctgtaaacgatgattactaggtgtggggggtctgaccccttccgtgccgcagttaacacaataagtaatccacctggggagtacggccgcaaggttgaaactcaaaggaattgacgggggcccgcacaagcagtggagtatgtggtttaattcgaagcaacgcgaagaaccttaccaggtcttgacatccagctaacgaagtagagatacattaggtgcccttcggggaaagctgagacaggtggtgcatggttgtcgtcagctcgtgtcgtgagatgttgggttaagtcccgcaacgagcgcaacccttgctgttagttgctacgcaagagcactctaacaggactgccgttgacaaaacggaggaaggtggggacgacgtcaaatcatcatgccccttatgacctgggctacacacgtactacaatggccgtcaacagagggaagcaagaccgcgaggtggagcaaacccccaaaaacggccccagttcggattgtaggctgcaacccgcctacatgaagtcggaattgctagtaatcgcggatcagcatgccgcggtgaatacgttcccgggccttgtacacaccgcccgtcacaccatgggagccggtaatacccgaagtcagtagcctaaccgcaaggagggcgctgccgaaggtaggattggcgactggggtgaagtcgtaacaaggtagccgtatcggaaggtgcggctggatcacctcctttctatggagcaaagataaggtgaaaaagacttatctaatccaaggtcaggttatgggaagtaaagaaaagagagcgttgtttaattttgagggtcttgggaacaagatcttcaaagtgaagataaagacgggggtatagctcagctgggagagcacctgctttgcaagcagggggtcagcggttcgatcccgcttatctccaccagcgggtgacccggcgggacatgacgcgccagaggcttgaaagagcggaagacgcaggatgtcacggagggaagcccacaaaaacggataacaggaatggaatctgtggaaaaggctgaagtagaagaacagccggcaactcaaaaggatatgggcttatagctcagccggttagagcgcacgcctgataagcgtgaggtcggtggttcgagtccacttaagcccaccagcgggtggccccgcgggacacgacgcgccagaggcttgaaagagcggaagacgtaggatgccgcgaaggggaagcctacaaacggatgacaggaatgttgcccaaaaagcgaacaggccggaaagggaagcggaagcataactggaagggctgggagcgctgcaccttgaaaactgaataaagaaagcagaaaagcgaaaaagatgtaatgaaacgagattagagattcatgaaaatggatcgatttttttaatcaaaggtaaattactacaattagcaaaaagcagcaagatagcagaaccaagagaaactcacatggtcaagctacaaagagcacaaggggaatgccttggcaccaggagccgaagaaggacgcagctaactgcgaaaagccacggggagccgtaagcaggcgctatatccgtgggtatccgaatggagcaatccggctggagtcatgtccagtcatcctatactgaattcataggtataggaggggaaccgcctgaactgaaacatctaagtagggcgaggaaaagaaatcaaccgagattccgctagtagtggcgagcgaacgcggaagaggccaaaccggaggtagtaataccaccggggtttggacagcataaagtacgcaagcgcttaggagaaaggtatgggaaggcctgccaaagaaggtgagagccctgtatccgaaaagcgtaagcggctggctgtatccagagtaccgcgggacacgtgaaaccccgtgggaagatggggggaccatcctccaagcctaaatactacctggtgaccgatagagaacagtactgtgaaggaaaggtgaaaagcaccccgggaggggagtgaaaaagaacctgaaaccttgtgcttacaagcaccgagagcccgtctaagggtgatcgggtaccttttgtagaatggtccggcgagtgaatgtatctggcaaggttaagcacttcaggtgcgcagccgtagcgaaagcgagtcttaactgggcgcataaagtcagatgtattcgacccgaaaccgggtgacctacccatgtccaggttgaagtggaggtaaaactccatggaggaccgaaccgactcccgttgaaatggtagcggatgaggtgtgggtagcggagaaattccaatcgaacccggagatagctggttctctccgaaatagctttagggctagcctcgaaatagattaccggaggtaaagcactgaataggctaggggccgagaggttactgaaccttatcaaactaagaatgccggataatcgtttttcgggagtcagacagtgggagataagtttcattgtcgaaagggaaacagcccagacccacagctaaggtccccaagtatcattaagtggaaaaggatgtggggttgcccagacaaccaggatgttggctcagaagcagccatacattaaaagagtgcgtaatagctcactggtcgagtgaccctgcgccgaaaatttaacggggctaaatgatacaccgaagcttgggatgacgcaagtcatggtaggagagcgttctgtaaggggagaagtcgtagcgaaagcggcggtggactttacagaagtgagaatgccggaatgagtagcgagaaatatgtgagaatcatattggccgaaagtctaaggtttttggaggaaggttcgtccgctccaagtaagtcgggagctaaggcgaggccgaaaggcgtagtcgatgcacatacggttgatattccgtaaccgctgaaagatttaaacaaagggacaccttgaaagggcataaccccggggttggtacaccggggcgtaagggaccgaaatttaagtagggaagtatgcatggacgagggcgagaaaagctttgcgaatatctgaggcgcccgtaccgcaaaccgacacaggtggacaggaagagaattctaaggccaacgggagaaaggtagttaaggaactcggcaaattgaccccgtaacttagggaaaaggggtgctcactaaggtgagccgcagagaataggcccaggcgactgtttagcaaaaacacaggtctctgccaaatcgaaagatgaagtataggggctgacacctgcccggtgccggaaggttaagaggaggagtgcaagctctgaattgaagccccggtaaacggcggccgtaactataacggtcctaaggtagcgaaattccttgtcgggtaagttccgacccgcacgaatggtgtaacgatctgggcactgtctcaactacctgcccggcgaaattgtagtaccggtgaagatgccggttacctgcgacaagacggaaagaccccatggagctttactgcagcttgatattgggtttcggtaatctatgtacaggataggcgggagactaggaaaccagtgcgccagcattggtggagtcaacgttgggataccgctcttaggttgctggaattctaacctgcggccatgaatctggtcgggggacattgtcaggcgggcagtttgactggggcggtcgcctccgaaagagtaacggaggcgctcaaaggtcagctcagcacggacggaaaccgtgcatcagagtgtaaacgcgtaagctggcctaactgcgagggtgacggcccgagcagtaacgaaagttggagttagtgatccggcggtatgtgaatggaaatgccgtcgctcaacggataaaagctaccctggggataacaggctgatctcccccaagagtccacatcgacggggaggtttggcacctcgatgtcggctcatcacatcctggggctgtattcggtcccaagggttcggctgttcgccgattaaagtggtacgcgagctgggttcagaacgtcgtgagacagttcggtccctatctgtcgtgggcgcaggatatttgaggagcgctgtccttagtacgagaggaccgggatggacgcaccgctggtgcaccagttgtcacgccagtggcacagctgggcagctatgtgcggaacggataaacgctgaaagcatctaagcgtgaagccggctccaagattagatatcccatcgagtaaatcgagtaagaccccttgaagactacgaggtagataggctgcgtgtgtaagcgtcgtgaggcgttgagcttggcagtactaataggtcgagggcttgaccatagagttatacttgggaaagcgcgttagtgatttacatcaaccacatcccttctttacatctccttttcttccctttctttattcggtttttagggcgcagattttattaaaaaatcaaggcaaggacttttgtccttgccttttttgctttgttttgcagttttatataagagattataaattttgtatttcgctgatgttctcttacaaagggcgtttcgggtaacttatgcggtacagctgctgcttagttttatagaagatagaaggcggccataatagtgaggaaagatggaacagagccagttcgctcttatcccatcttacctcttatcttacggtgacgtaaatgtcaatcatacagctaaagagcatcctgaatgtggtattgtgctttgtaatcgtccctatgagaatctgatatactccggctggtcttaacaattcctttgctagtatcaagatatgaggtgaacttgttatgagtttcctcattttttcctccaagtatactatccacccatgaagcaatattgtcttggagaacgctgtcggtatatatccgggtcaggttaataccatagtcagttgtatcgtaaaccatctctatcgcgttattgagtaacaaagcgtcctgttcttgaagagttgaaacgtaagaggattttagttcaagtgttacttcttttagtaatttatcaaactttgtgacagcgtgtatttgcaaataagtttcagagatatttcctgtagcaaataaaccgtcagacaataaaacgccgacatccttagccagcgaaaggattccaagcggctggtatgctgttgtgacgattttttctagataatcccaaaatattttatcagcgctattttgaaaagcaagtaaaaactgctcgtaaggcgaagaactgaacatttgctccatatggttcagagcggttttcatttccggaattgtgcatttctcagatattctatgtatgattgtctgtttctctttgctaacgcgtgaaacggcgctgtatttactaaaattgtcaataaaatcttttaatgtttttaagtggcttcttagagaggtaaagatgcttatagtatcggcggcggctatcccagttgctttttcgtaattctgcaaagctgtattgatgagtgctgggtcaacagaagagatgctaatatcctttagtgtctgacctgcttccagttttataagctttgataaaatttttagcaaggtaaaggcagaatcctcttctatcgcctggattcttgaggaaaattcactcgtcttacactgctgtacaataatgtctgaaataacaatttcataaaaatattccggatgatccctgaattttttgttggctattttttggtacaaagttgtcagattattatataatccatcggaagccgcagcgtcatctatcagcttgtatggcatatcgtaagcaaataagctgttccagattacttggttgttcaaatcgcgatccgccttataaacctcaaatggcggtacagaatagtctgatttattccaggtcccggtaaaaacatatcccgtagaggtattgttgctttttactgttccgccatttaaaataaaaatatggttgttgttatcggtaatagatatatcaactgtctgctgatgggtttcgggattactgaaaacaatattagtgtatttcgcaggaacctgtatgatgtacaagtcgtcgttaaaatgttccatttcatatcctggccagagggttggaacatcactgccgttccaaaaataggcatatggcgttgcgttttcccatgcggttggctttttcaatagtataggtattgttccggacggttccgtcgattgataccgggaccatgtttcatttttataggaataggccatgttgtttcctgcatagttgatatattttgttttctgcgcaccgttattgctgaatacaaaccaataaatgtcgtcttccagtgtgtaggaataaatattttcagttactcgacacataggttcccccaaaagaggtgcggcgagattgttttttgcagcaaaaatatagggagagtcccaattatcgggcgcttcaaaataaattgtacttccttttgttgacggctgtaccggctctgcaggcggtttatactcagaatatagtacccaactgcctgtaattgttttgccgcccgcgcttgccgggcagaaaatatagtcagttcccggaataaccaaattggcggtctgatttgctatattattaaaaataatattattatactctgcgggaacctcgagcatataaatgtcccctgcaactgggctcataaccgttcccggccaggccagtaaatttcctttatcattccagacataacagtaaatttcactccatgattccggggctttaaaataaacggtcttaggatggtccggatttgtaggctcggtggaagggctcccgtcctcgctgtagtcttcccatattcctgttgagaaccctgaacttgttttttgaattctataaattttattttcaccaggaatgacaaggtcataagtcctttgactgcttgagctgtaaaaaataatgtttatcatttcctccggaacatcaaaacagtaaatttgatccttgacatgcgacatttctgttccgggccagggagaaaaagagccggagtcattccacagatagcatgatactttcccccaggaagatggaacttcgacataaaccgttttggttcctgcggcatcggcattcagcggactgggaagcaaaaaaataccgcaaataatcagtattgtgagaaaaatagatgtagtttttttaaaatttttcatgatttacctccttaatgcataactaaaaaagaatttatacgtgaataatattcacattatttacttgcgttctatttaatttaccctcattatataaagattttatatagctataatataaatatatcagaaaaatataatattgcaatagcttgtcggataagaaaagggagattccattggaatctccctttttcatttattttaaaaaatcacaagatatgttcacctattcgccccacatccccatccattacgctgtatttgcttaaaagctttccctccacctctggggaaaggttcgagtggatgtacaagctgtcgagccccgcttcaaacgaaccgcggatatcggtaatataatcgttgccaatcatgatagtctcgttctgtttcaaggcatagcggcttaatatcgtctcatagaacgctttgtccggcttacaggtgtactcgtcggaggagataacaatcccgtcaaacagggaataaatatcgagcaggcggagctcaggcacggtaaagcagcgctgggcgtttgtcagcaggtaaacgcgcctgccgttagcctttaaaccggacagcagctcccgcgcaccgggatacagccggatatatttcgtggaaatcgcgcggaacgcctgcgccgtatataaagccagctcttcgcttacgcttacgcctttgttttggtataaccgggcaaacacgtgctccagccggatgtcgatatgcttgaaagccggatgcgttttctttgtctgctccttttcctttgctgcctcggcatgataggcggcctttaattccttcggtgcgtaaggcgcactctggaacgcataaagctcgctcattttttcccaaaggtatggtttcctctcgtttgtatggatgtcaacaagcgtgccatacaggtcaaacagataattttgatacataacagggtctcccttgccaaaaggctgaattttctattttatcttatcacagcacggcaagaaaataaagcgcgggtgctgacaaacaggaggttttgtgataaaatacaattcggtgcctctattggcgccccaaaggacaggtgataaaaatgactgacaggaagaaggcgctcctagccattgaagcgctcaaaaaggaatacccggattcaatttgttcgctgacatatacagaccccctgcagcttttgattgcgacgcgccttgccgcgcaatgtacggacctgcgtgtcaatatggtgactcccgctttatttgagcggttcccgactgtggatgattttgctggcgcggaagtggaagaggtcgaaaaatatattaagagctgcgggctttataaaacgaaagcgaaggatatcgtcatgatgtgccgtaaactcaaagaggagttcggcggggttgtgcccgataccatcgaggaacttacaacgctgcccggcatcggcaggaaaacggcgaacctcgtcgtcggcgatatatacgggaagcccgccgtcgtggtggacacccactgtatccgtattacttcgcgccttggattccataatattaaggacgcgggaaagatagaaaaaatcctccgggagctgctgccgcctgaggaatcgaacgatttctgccaccggcttgtgctgcacggccgcgcggtctgcgacgcaagaaaacccagatgtgaacagtgctgtatgcgggagttctgcgatacggcgctcgggaaaaaataaggcggtcagggatggatacttttagaaacaggtgataggttatgtcctttccaaaggataaaatcaggaatttcagcattatcgcgcatatagaccacggaaaaagcacgcttgccgaccgcatccttgagcagacgcagtccgtcgccatccgcgatatggaggaccagctgctcgataatatggatttggagcgtgaacgcggcattaccataaaggcgcatgccgtttcgcttctgtatcaggcggacgacggcgaagaatatatttttaatttaattgatacgcccggccatgtggacttcaactatgaggtgtcgcggtcgcttgccgcgtgcgagggcgcggtgctcgtcgtcgacgcgtcacagggaatagaggcgcagacgcttgcaaacacctatctggcggtagacggcgggttggaaatcgtccctgtcgtcaataaaatcgatttgccaagcgccgaccctaagcgcgtaatcgatgaaatagaggacgtgattggcatcccggcgcaggacgcgccgcaggtgtccgcgaaggcgggaatcaatatccgcgcggtgctcgagaaggtcgtgcgggacgtcccgcccccgcaaggagacgaaagcgcgccgcttaaggcgttgatattcgattcctattacgacagctataagggcgttatcatatatatccgtttgatggacggaaaggtgaagcccggcgataccatccgcctgatggcgaccggggcggaatttaccgtcgtcgagtgcggctttttgcgcgcgacgagcctggaaccggctggcgggctttccgccggggaggtcgggtatatcgccgcttcaattaaatcggtgcgcgacgcgaaggtcggcgataccgttacgctggcggataaccccgccgccgagcccctgcccggctaccgcgaagtccagccgatggtgttctgcggtatttatacgaccgacggcgcgaaatacccggatttgcgcgacgcgcttgaaaagctgaagctgaacgacgcgtccctctcctttgaaccggaaacatctattgcgcttggctttggctttcgctgcggctttttgggcctgctgcatatggaaattatccaggagcgtttggagcgcgaatataacctcgacctcatcaccaccgcgcccagcgtaatcttccggattaccaaaacagacggtacggttgaaatgatagacaaccccaccaattatcccgacccttccgtgatacagatggcggaggagccgataacaaacgcgcatatttatgcgccaagcgagtatgtcggcaatattatggagctttgccaggacaggcgcggcgtgttcaaggacatgaaatacatcgacgctgaccgtgtagatatccattatgagctgccgctggcggagattatttacgatttcttcgatacgctgaaatcccgtacacgcggctacgcttcgttcgactatgagctcgacggctatgcgcagtcgaagctcgtcaagctcgatattatgctaaacggagaaatcgtcgacgccctctcgttcatcatacacgaagacaaggcgtatgggcgtgcgcgcaagatggcggaaaagctcaaggagaaaatcccgaggcagctattcgaggtgcccatccaggcgtgcattggaggcaggattatcgcaagggaaaccgtcaaggccatgcgcaaggacgttcttgccaaatgctacggcggtgatatttcccgtaaaaagaagctgcttgaaaagcagaaggaaggcaagaagcggatgcgccagcttggcagcgtggaggtgccgcaggacgcgtttatggcggttttaaaactggattccgattaactgcagaaaaagaggaggatgctgttcatacaggttcctccttttcattgacagaataaaatttgctgtttcttttttatcataaaaacggagcgggagcctatataggctcccgctccgttttagaataaatgcaatttaaaagctggggttattctttcgctgaatcagcagtattatctgcagaaacatcctttcttctgcggtgaagctgcgtcgctacaatcatagcaatgaagataaacagcgcggcagcgcccgcgacaacgcctggaataaagccggcaggcgaatacttaaaggaaatttcgtggctgccttcgtcgagatagaccgcgcacatcgcgtccgcaacgggcgtgatttccgtttcctcgccgtcaacaaacgctgtccagccgggttcgtacggaatggaggtgtacatcaggccgtcggcctttacatcgattgtacccttgacctcagtggaggagaaatcagtgactgtaagcttttcgtcgttcaggaggtcatagccccggtcaaaaacgtcctgattgagcacacagacataaatatcggcatttccgctgactccctgttccgaaatattagagaagaaggagacggtttcgccctttttataatgtccggcagagaagatgtaggggcgtttgatgttgaaccagtgctccgagccgccgccgcttaccagcatattttccgcattgtcgatttttgcgtaggcgtacagaacgccgtcctccggcatttcgtaattccatttgacggaaccggtttttgtggtatccttcggcttgtagttatactggccatacgtgccctcagagtcatagaagacgtcgtagttgttgtgtccggcggtctttaccgttacgcgggtaaagagctcgtcggtaatgccggtcgatttttcaaacagctcctgctgcgcggcaaacgggtcgagcttgttcggctggaaggtggacagcgcgttgtccgccataaagcccaaggaaaggtaccggttgtttttgtaggaaagcatcccgtttacatcagccgtttttgaccagttgaccgtgtcggcaagatatccgtttttggcaatcaggtatttgatatcggcaaacgcgttggtaagcggggaggtttcggcatagtagtaccggttgccggcgtcccagccgagcaggccgattccctcaagatagtttgtcacgttgacgtttgcggtggaagcgaactgtgaaagtccctggaacccgtaaagcggcgggtcgttgagggaataaaaggcggaaaattccgtgcggtagaacttttcatcatcctgtgctttgattgcggagagggatttttgcacggtgtcatactggtcgggatagctggaacgcgaagtgacgcggacggtatccacaccaatatatgcgttgatacacatctcgaccaaaatgacgccgcatacaatgccggtgaccgcctttttattgaatacctttttctgatagaggaagaaaacgagaaggatgattgccgcgagcaccgcgctgcctgctacggctgtcgtaccctgcggcccaaaagcagcgcacgcgatgacgaatacagcgactgccgccattgcgaccaaatcggccgtgttcatgtcttcgagcagctggaacgcgcggtaggccataatgaccaggataaaggaaatcaggaaggaatagcggtacggaatcatatttgtagagtggaacccgtgccagataaagttcaaaacattgacgttgacgctgataatcagaaatgcgaggattgaaatgttaaaaactttttcccgtgttttaattttccttgaaaggaagaacacggcggcaagcataacacagataatgccgcagtaaacattcggcaggccttccttgacgtttggctcggcaaaggccgagaagttaccaaaaatatcgaaaaacgaattttcaaaccgccaggtggaggggaacgcgttttccgcgctgtaggtcagctgcaggttgaggtaagcgggcagcgtaataaacgctgtcagcatcaggctcagaacggagctgccagcaatcaggcccaaacgtttgaaaaaggtcttccacgggatttttgtgcagatacaaacgccgaagaagacaaacaccgtaaaaatacagataaaaaagcccatataatagttcgtcatgacggcaagggccagggaaataatataaagccggaactttccttcccgtacgagtgccactgtaccgagtacgacaagcggaagcagggcaaaggtgtcaaaccagatgatattccagtaatagcccatcgtaaaggcgcacagcgcatacagtacggaaaacaggggtaacgtaatgtcgttacgcttgaaggtggatttcaggaaaatcgcggtgaacaggcccgcgcagccaatacggatcatcaaaaacagggtaagggcctcgcgcaggaattccgccggaataatcagcgtaagcaggttcagcgggcttgccaggtaataggcggacaatgcgacaaagttggtgcccatgcccgtgtcccatgaatacagcagggaagagccctcctgcagcttgctctggaaatccgacaggaacgggtaatactgctgccataggtcggtcacgaggatttgctcgttcccaaatggatacacgccgtgcagagcataggaaacccccatgagtacaaacggaatgacaaacgacaaaacgaggtaaagcttcgtgttcgcctgccgttcaagcgtttggagcgtaccggcgggcggcgccgtattttgacggcttttctttttctttttactcatttttcttgaatccttcctgaaaaatttaacgtgtaaacaaatacaatccattttaccattaaaatgctttttggtaaaccattcccagcaaaaattcataattttctgaaaacagggcagaaaaaattggggtaaggggggagccccgctataaactcaacggagtaagagaaaaaattccgccggcggtatctgcgggcagccgtttaaagatattgggaaacaggggaaagcctttgctttttttgatgtattttgttataataccctcgtatataaattactgacgggggttgtcctcgaatcagggatgaagaaaggatttgggtgcttatgaagcaggtcgacattgtagtcccctgttataacgaggaggaagggcttgaggttttcgttgaggaaaccaccaaggttctccgcaccatatacggctattcgttccgctttattctggtcgacgacggcagcaaggacaagacgctccaaaaaatgaaggagctggctcagcgccgtgaggatatcaaatatatatccttttccaggaatttcggcaaggaagctgctatgtacgcggggctggaaaattcaagcggggagtatgttattgtaatggacgctgatttgcagcatccgccgcagatgattccacggatggttcacgggattgaggagggccacgactgctgtgcggcaagacggataagcaggcagggggaatctaaggtccgcagctttttttccagaaccttctataagctcagcaataaaattacagacgttaaaatgccgtatggcgcggttgatttccggataatgtcacgccagatggtcgacgccgttttaaggctgtgcgaagtgcagcgcttttccaaggggatattcagctgggtcggcttcgacaccaaatggctgccgtatgaaaacgtcgagcgttccatcggcacaacgaaatggagcttttggggcctgtttaaatacgcgatagacgggattacggccttttcggtcgcgccgctgcgcgttatatcagggatgggtatccttatctccctgtttgcgtttgtttatattatcctaacgcttgtcaaaacgctgattacaggaatcgatgtgccggggtacgcgacgaacctctgcgcgacgcttttcctgggcggtattatagaattctccgtcggcatcctcggggagtatgtcgggcgtatttatatggaaagtaaaaaacgcccgatttacctgacaaaaagtacgaatattgaaaaaacttctgacaaagacctgaaggattgagaggaaaagtgaatgggagcagtcaaaaagttctttgacgtcaaattctggaaatttgtgctggtcggcgttgtgaatacgattgtgggctacggcattatgctcggctactacaatgctgcggcatcatttggctggttcaacggcgatatcaattactggattggttcggcagccaatattatcatcggcagtatcttaagctacttcctgaataagcattttacgttccagaacaaggacagcaataaaaaaacggcaatccgctttattatcaacatagcagtctgctatttgcttgcctatggcatcgcgaagccgctgattacatgggttactgtaaattggctcggcggcttctcggcggctgttgcgggctggctttccgggctgagctttttcgcggagaagacgatgccggagctcgtaacgctcgtttccgataatatttccatgcttgcgggctcagtgttctttgtgatgttcaattatgttgggcagcggttttttgcctttaaggaagaaccgaaggaacaggcggcagaagggaataaagagtaaagaaaaccgcccgcgctataagcacagcgcgggcatttgctttctatgggaatatttaagcggagacggctgcgacgaaagagggatatgaaatggatattacaatcaggcgttacagggaggaagacctttccgctatgacggaaatatggaacgcggttgtgaacgaaggcgatgcgttcccacagacagagccgctggggtgcccagaggaagcccaggccttttttgcgggccagagctttacaggcgttgcggccgacggggatacggtcctggggctttatatcctccatccaaacaatatcggccgctgcgggcatctgtgcaatgcaagctttgcggttggggagcaggcaagggggaagcacatcggcgagcgcctggttaagcactgcatggaacagggagggaagcttgggttccgcatactgcagttcaacgcggtcgtcaggacaaacgcttccgctattcatttatatgaaaagctgggttttgtaaagctcggtgcagttccgggcgggtttcagatgaaggacggcagctttgaggatattgtactattctaccatacgctataatccggctgggatgtctcgggaaaggggagaatgcattgaaaaaggattacctgctgccgctcgggatatggctgctttttgaggcggtagccgttgcgctttggcttacacttgataacttattttatttgtttaatttttcgtatataggaacctgccttgcggtggggatattgctttacagcaggcggtggaaatatgcgcgcagcgccgtgcagcttgctgtagggctgtatatgctggtttaccttggcttgatatcgaacgagaacatgcagatagaaggcttttggtactatctgtttgcgggcgtttttgaggcggccgtcatccactatgctgtcgccaaaatatttgggccgctgctgtttggcaggggctggtgcgggtatgcgtgctggacggctatggtgctcgatttattgccgtacaagcggcgaaaagcgccaagaaaaaagctgggcttcctgcgttaccttgtgtttatatgctcccttatttttgtcggggcgctttttttcctgcgtgttcccaatatggagaaggtgatgttctggagctttattatcgggaacctgctttattatggggttggcatagcgcttgcttttgtgttgcgggacaaccgggcgttctgtaaatacatatgcccggttacggtgtttttaaagccgatgagctacttttccctgctgcgtgtcaaaaacgaccggacaaaatgtatttcctgcggaaagtgcgagaaggtatgcccgatggatgtgataatgacggataataaaagaagccgtcccaacgggacggaatgtattctgtgcctgcgctgtatcgatgaatgcccggagaaggcgctgcatctttaaaatggggggcgccccttgctccccgctggattccggggcaggccgctgagaacaaaaagcgggacagcgcaagtccacgccgtcccgtcttattatgcctgtttgttttactgaatcgagcagtcgagataccgctcaagctcttcgtcgtcttttcttttcttttctttcatgattatgaaagcggtcactgcggccgtaatggcggcaacggaggcaatgatggcaatcagcataccaaatttatgttttttcatagcggaaatacccccaaatatattaatacgatgtttctgatattataatacccagttttatgaaaaaagtcaatctttcctcctgggaaaaaataaaattcaagctttgttcaaaacttagcaaaaaataaaaaaagcagggcatactgctctgcttttacggcgaaaacaatcttttaagcggtggcgttgagcttgcgggcaagtgcggacttctttcttgcagcggtattcttgtgcatgattccctttgcggccgcctggtcgattttcttcattgcaagacgtactgcctccgccttatcggctgagtttgtgtcaacagcaagattcgcttttttcaccgtcgttctcaaagcagacttataagctttgttattcgcggtttttactgcggtaaccttgacacgcttctttgctgatttgatgtttggcattgtcccacctccttctgctcatactcgtgtacaagacatactatcatcttttattcaaaaaagcaagtgtttttctagcttttttcaaaaaaaatttacaggcacaagatgtagtagcacgggcgaaagatgaatacaaccgaatttatacttactggttaagctagagaaatacacgcatgcacgcgattgaaatcagcagcacgccggaaaagacgttaaacgccctgggcgggatttttttgagcattgtaatttttttgccaagcccaatcccgccgcataaaaatagaagctggaccgcgccgacgagcagcggcgtcagataggagccggttcccgtcacggcataccctacgcccgcgccgaaagaatcgatggacagcgcgattccaaggtacagcgcttctcccgtttcgattcgcctggagctgtcggcgtcaaagctttccggctttttgaacagccccgtgcatacaatatatatgccgatgcccacgagcatcagcgcgccgagtgccttcgcaaccccttcgggtataaacagaagcaggatatgcccgaaaaaaagggcagccgcggtaaacatcaccgaaaccaggcagatgacgatttttgcgcccagggaggtttttatcccccgaaggccatacgatacgccgattccgagcgcgtccatactcagggaaacggcaagcagcagtgcagacaatcaaacacccccttacattcaaaatatgaagggggcgcgaatgtgtgattttgaggacctgcctatttatataaatagaaagaaacgccgcgcaaagcaaaagccctgcgcggctgtctctataaaaagcggctttgtaggtcgaccccgccgctttctattctatgcagcataaagaaaaggggaactctaaaagccccccttccgtttattatttttgttccccgctgtccccgccgtcttttctgcgccgtcgcgctatgaggtaaacaacggccgccgcgataagtacagcgccggaaatacaccgcaggatgacgacatacggcgcatccttgagcatatcgacgcccggagtcagctcgttagcaagccaccacaggcagaggaaaacaaagtagctgccgagaaagcaaagaatcttatgctccttaaccccgtttacaattaaataaacgccgataataagccacatagcggcgaaaacatagcccatttataatcagctcctcctatctctgcgggaggtctttttcttttttgtcccttggcttctttcttccctggattttttaggccggctgtagaacaggcagattaatagatagccgccgaatacgataatccccgtgtaatgaatccactgcattgcatcggttccgggccaaagctgcgttacaaggtaattcgccgccatccagacgccttcaaaaataaagaacagcgctacgggacggaaaagcggtaccccgcggaagagcggcgcaaacagaattacagccacggcaaggcaaataaaagacgcgattaaaacaatccacataaacgccgttctccttcctgagattttctattcaaagtatatagaattcgggcagggaagtcaatagcaaagtaaaacgccgaaaatccggcgcctcttcataattagtttacaattaaaaacttgacaaaagcggggcgcggtggtaaattatagataaattagcactctcctttttagagtgctaacacaacagggaggttcggcatagactgggagaggtgatggatatggagctggcgccgagaaaaagtaaaatcctttcggcagtggtggaaagctacatccgcacaggcgagcctgtcggctccaaggccttgctcgaccagatggatttatccgtttcctccgcgaccatacgcaacgagatggcctccctttccgaaatgggctatcttttgcagccgcacacgtcggcgggacggattccttcgcacaaggggtaccgccattatattgaccatatgatgcccatacggccattgcccgggcagagcagggaattcattgacgcgcgcctgaacgcatcagcggacgacccggagcacattttgaacgaggcctccggcatcctttcccagattaccggtatggcctgcgcgtcgaccacgccgcccggcgaaagggctgaaatccgcaaaatccatttggtacagacaggccggcagacggcgatggccgttttgattacctcctctgggatggtcaaaaaccggctgtttcgctgcgattacgtgctcacgcccgaaatcgtcaaggtattcgaccggctcttaaacgaacggtttggcggcgtttccctgcacgatatcacacccgcgtttatccagacggcggcagtcggcttcggcgagcttgccatgctgatgccaaacgtactcatggcggtgatggaatcggcaaaggaagccgcgcagatgaacgtgagcctgcatggggaaacaaacctgcttttctgccgtgattacgatttgcaggacgtgcgcgcggtgatgaagctgctgcacagcccgccggacacggccgctctgctcttaagcggcggcgaggaggctgaggtgttcgtcgggggagagagcggcaggcaggagcttacaaacagcagcgtcataacaaaacggtaccggattgccggagcccctgcgggggccgtgggaattatcggccctgtccgcatggattacggcaggagcctgagcctgctggaatatgtttccggcgtggtgggtacacttatcagtgagttgctggagatataaacgcttgaaaagaagcacggggccctgtccccgcagaaaggaatgagtttcatgagcaagcagaagaaggaagaggccgcgcctcagactcatgaggaagaaacgaaggaacaaaacgaacaggaggccgccggggagcctgggcagaaaaaagaggctaagaaaaaagaagcaaaaaaagaaaaggactccggcgcgctcaaagaggcgcaggaggagctccaaaagcagaaagacagctatatgcgcttagccgccgagtatgacaattacagaaagaggacgacggctgaaaagcttaacatatacgccgacgccacggcaaaggccgtttctgaaatccttgtcgtcgccgacagcctggaagcggcgcttaaatcgtcgaagggcgcgcctgaggagttccgcaaggggctggagctcgtaaacagccaattcacggcggcgctccaaaagctgggcgtcgaagcgtttggggaagccggcgaagcattcgacccgcagcttcacaacgcggtttccaaggtggaaaacgaggagcttggagaaaacacgattgcgatggttttccagaagggctataagacgggtgacaagataatccgccacgcgatggtgcaggtagctaactgcgattgatccgcaaacgaatcaattgattgacataaaccaaaagatatcaccggaaaatatgggaggaatttatcatggcaaaaacaatcggtattgacttaggtacaacaaactcatgcgtagcagtaatagaaggcggagaacccgtcgttatcgcaaacgcggaaggcgcaaggacgacgccgtccgtcgtcgcgttctccaagacgggtgaaagaatggtcggccaggtggcaaagcgccaggcgattactaaccccgacaggactgtggcttccatcaagagagagatgggtaccgcctttaaggtaacaatcgacagcaaaaactacacaccgcaggaaatttccgcaatgatactgcaaaagctgaaggcagacgcggaggcttatctgggcgaaacggtcacgcaggccgtcatcaccgtccccgcgtattttacggacgcgcagcgccaggcgacgaaggacgcgggcaaaatcgcgggactcgatgtcaagcgtattatcaacgagccgacggcagccgcgctttcctacggcatcgataaggaaaccgaccagaaggtcatggtatacgatttgggcggcggcacgttcgacgtttctatcatcgagatgggcgacggcgtacaggaggtcctcgcaaccgcgggcaataaccgcttaggcggcgacgacttcgaccagcgcgtaatcgactggatggtatcgagctttaaggcggaaacaggcattgacctttccagcgacaaaatggcgatgcagcgtttaaaggaagcggcggaaaaagcgaaaatcgagctttccggcgttacgcaggcagccattaacctgccgttcatcacagcggacgcaactggccccaagcatctggaccttacgctcaccagggcaaagttcaacgagcttaccgcggacctcgtggaaaacacgatgggccccgtccgcagggcgctgcaggacagcggccttaccatagataaaatcgataaggtgctcatggtcggcggttcctccaggattccggctgtacaggaggctgtaaagggactgattggcaaagagccgttcaagggcatcaaccccgacgaatgcgtcgctatcggcgcggctatccaggcgggcgtgcttggcggcgaggtcgacggcctgctgctgctcgatgttacgccgctttccctcggcgttgagacaatgggcggcgtgatgacaaaggtcattgagcgcaacacgaccatcccgtcgaagaagagccagattttctccacagcggcagacaaccagacacaggtggaaataaacgtcctgcagggcgaaagggaatttgcccgcgacaacaagcagctcggcctgttcacgctgaccggcattgctccggctatgcgcggcgtgccgcagattgaggtcacctttgacatcgacgcgaacggaatcgtaaacgtatcggccaaggaccttggtacaggcaaggagcagaagattacgattacctccagcacaaatatgtccaaggacgacatcgacaaggctgtcaaggacgcggagcagttcgccgcggaggacaaaaagcgccgtgaagaggtcgatactaagaatgaagccgagaacatgtgctaccaggtggaaaagctcatcagtgaaaacggcgacaaaatcgaccaggcggacaaggacagcctcaatgccaaggtagcggccgtaaaggacgcaatcggcaagaacgatatggcagccatcaaggccgcgaaggaagacatggaaaagacgctccagggcgtttccgcaaagctttaccagcaggcggctccccagcagccgggtgcggctccgggaactgacccggctgccggcacgccgggcggcgcagcggggcaaagcggcgacggcaacgtatatgacgccgatttcaaggatgttgactaaaataaaaaatttgatgctgtgcccagggcggtaagcccgcgggcaggggcaataacattggggcagggcgacctgccccgtgttgccgttatcagatagtaccataaaactgtagacgcggcggccgttttagagtatgatagaaaagctttgagttttaacataacaaggaggcgtcattttggctgacaagcgagatttttacgaggtgatgggagtacccaaaaacgcctctgaggatgaaataaaaaaagcgttccgcaagcttgcgaaacagtaccaccccgacctgaaccccggcgacaaagaggctgaggcgaagttcaaggaggtaaacgaggcctacgaggtgctttccgataaagacaagcgcgcgcgttacgaccagttcggccatgcgggcgtagacccgagctacggcgcgggcgcggcgggcggcagcccgtttggcgcggatatggactttggagatattttcaacagctttttcggcggcttcggcggaaggcagcacgctaacccgaacgcgccgcgccgcggcaccgacatagaaacgaccgtcaccatttcgtttgaggaggcggccaagggctgcaaaaagacagtgtcttaccagaacgtcagcacctgcagcgactgtaacggctcgggcgcggcaaagggaacctcaccgaaggtctgccccgcgtgcggcggtaccggccaggttaaaatcagccagcgcacaccgttcggcgtaatccagacgtcgcgcgtgtgcgattcgtgtaagggaaaggggcgcgtcgtcgaaacgccgtgccgcacctgtatgggtaccgggcgcgtcaaaacgaagcgcaccgtcgatgtggatatccccgcgggtatcagcgaggaccgcgtgctcaatgttagcggccacggcaatgccggcacaaacaacggcccttacggcgatttgcacgtatatgtaaacgtccgcccgcaccccatatttgaacgccgcggcgacgacgtatggtgcgagctccccattacctactcgcaggccacgctcggcggcgaggtcgtcgtaccgacccttgacggcaaggtaagctacagcatacacgagggtacccagccaaacgacgtgttcaagctgaaaggaaagggcatccagcatctcggcggcagaggccggggcgaccagtatgtcagggtcgtaatcgaagtgccgaaaaacctttccagcaaacaaaaagagcttttacgggaatttgaaaaggccgtaggagaaaaaaattaccagaagcgcaagggcttctttgataaattaaagggcatgtttgaagaataaggcggtgcttttttggactggacagaaattaaaataaacgtttccgcaaaggatttagggacggcgggcgatattgcccagatggtcgtgccgtatggtatttatatagaggactactccgcgcttgagcaggaggtgcgggagattgcgcgcatcgacctgattgacgaggcgctgctgcaaaaaaaccgcgacgagggtgtcatccacgtatacataagccccgaggaaagtccaagggaggcggtttcctttttgagcgaacgcttaaacgctgagcagatagcgcatgaaatcacctgtgaaagctgtgcggaggaggattggcttcataactggaagcagtatttccatccaatgccggttgggaaaaggcttttaatccggccgacctggcgcagtgagtacgacccgcagggacgtgttgttttgaacctggaccccgggcttgcgttcggcaccggcacgcacgaaacgacaaggctttgccttacggcgctggagcgttacataaaacagggcggccatgtgctcgacgtgggctgcggcagcgggattttagcggttgcgtcgctcctgctgggagcggggcgcgcggttggcgtggacatcgacgagcttgccgtaaagacagcaaaagaaaacgccgcgctcaaccaggtggaagaccgctttgaggcaatctgcggcgacctgaccgaaaaggtttccggaaaatacgatgtagtatttgcaaacatcgtggctgacgcggtgattttgctttcaaaggatattgccggctttttaaaggatgatgccgtttatatcatgagcggcattatagacacaagggtgcaggatgtcacgcaggcgcttaaaggccgctttacaatcatcgaaaagctggaggaaaatggctggtattgcctcgcggcgaagaaaatcaaggcagaaacacagaattgataaaaaatttttctgtaaagacataattccttcatattttactggtaaaataagcatggttttttagcgaataaaagatttatggaggtcgtacaaatgagaaaaacaaccaagagggacaacattaacttattgatttccgcattcctcgtcatcggctacatcgtatgcgcctatttcttcagttcttttgtgggtaccaccgttgacgccgcggtcggcggcatcatcaatatggcaatttacctggtattcggtttgattttattctatgcaacgcgcgtgggtgacggcaaacagctcgttcgcttcagcatccccacgttcatcctcatcgacctgcctgcaatttatattatcgcggcgtattttgcggtcggccttccgttccatacggagctggcggccaatactaccgtcgcaatgctcgcggcagcggcgctcggttacggaattccgtacaccttcttaagcggctttgagcttgtgcaggaggctcccgccggggaagcggaggaagaagcccagccggaagccgggggagaagcctacagcacgctggacatcgcttttgaaagcgaagaggaagcgcagagcggcgaagcgctttccacagaagagctggcggaggaaccggcccagccccaggaaaataacgaaaacgaagaatccgcggatgaaacggaagaatctgcgaaataatatagataacctataaaacaggagatgcaagcaatggcagaaaactgcagcaatgactgctcaagctgctcacagagctgctcggaaaggcggcagcccgaggacttttccgcaaagcttaacgagcacagcagcgtaaagaaggtaatcggcgtcatcagcggtaagggcggcgtgggcaaatccatggtcacctccatgctttccgtcatatttaaccgccggggtttccgcacggcgattcttgacgcggatattaccggaccctctattcccaaggcgttcggtattaataaacaaaaggcgcagggcagcgaattcggcctgctccccgttaagacaaagactggtattgaggtcatgtctgtcaacctccttttggaaaatgaaacagaccccgtcgtctggagaggcccgattttaggcgggacggtcaagcagttctggtcggatgttatctggaaggatattgactatatgtttgttgatatgccccccggaacaggcgacgtaccgcttacggtattccagtcgctcccgctcgacggcattgtaattgtgacgtcgccgcaggagctcgtttccatgattgtcgcaaaggcggtcaatatggcgaatatcatgaacatcccaattctcggcgtagtagagaacatgagctattttaaatgtcccggctgcggcgcgctgcacagcatttacggagagagccatctggagcagactgcgaaggaatatgggctcgatatcctgggaaggattccaatcgacccctcggtcgcaaagtcggccgatacgggtaccatcgagctgtttgtcggccattggctggaaagcggcgcggacaaaattgaagaaaaatgcaagaaataaaaaattccgggcgccttataacagcgcccggtttttattttttgttgtttttacactggatgtttaaaattgtttgcatttggttttatttgcaaagcatggaaaaatcccttgataagaccttgaagaaggtataacccgtccgtgcttaaaaaaatttgtatagcaggacagctatgaagaaaagctccttgccgattgtacggctgttttgcccattaccgcgggagcatcctaccctctgctgcgggatttggctgaacacagattcctcccgcaaaggcggtattatggccctttaaaccaaaacaggtcgaacgataaattttagcggcggagcataaactgctccgccgctgtttgtatcccgcagacaggaagttattgcggcgcatccgggtcgtagccccctgctttctgaaagcccgccgcagtaagcatttcatgcgcgcggccgcttgcgtagttataatttttatattccccgctgtaccggttatacacacgctgcaggtaatccccgcaatctgcgcgaacctcggcattcatgccggtatcaaggtaaagcggcagcaggtactccacggcgctgtcgtcaagcgtatccagcgccgaagcgcccatccagtcaatttttccctcctgataccactgtacattgtattttgccgtcatggcgtcgatatttgcaaagctcaggcacataaaaagcgcagcaaacaccagaaccgccgcgcgctggaataaaaagcgcggccatatcattttgataatgagaagcaggaaaatgcaggcgagcaaaatcatgaaccaggttggataaatccgcatagtggtaaggccgaaggaatcgatatacattaccattttactaatcgcggaggcaatcagcataagcgtcaggacggacagtacgatactgtatatgcgcgcggcaaacggcagacggcctttattgtctctgtggcagaataacaccgcaaggccgattaccgccaaattgatgaccgcgaccgcgcagagctcaaaaaagccctgccgcgcgtattccgcgtagccgaagcccgcgggcagcaggctccgaaacgctgaaaggaagtacccggactgcgccgcaaaaaacagcacatataaaacgcacagcggcgtaagcgccgcgtagataagcgcgccgggcgcggtcctgcgtgcctttttggggagagccgccagctttggcggctcctttttgtttttgctgccataaagcagtccgaaaaaccaaaaagcaaccggtatcccaaggaccgcctgaaaaaaaacaaccagaagctgcggccaaaagtcgccaattgaaaatgacatgaggctgcggaacatggcgtcgcccgacatcaaaagcgccgccgcagccagtgtaaccggcagggcaagcagaagcccgagaaaaacccattttaccttcttgccgccagcgcgcctgaaaagctggacggccgcgttggggcaggccccataattggaaaagggcgtaataaacaggctgtttcccacatcatggaccattcccctttttatgaaccctttttgacggaaggcggtaaaaacaaaatacgcgccgcctgccgacagaaagacaaggtctaaaaacttgataaacccgctggatgaaaggcagaaattgaagctcagcgccgcaagcacaagcgcgcccgcggcagtccatacggaaaaccgcatatggctgcgctccatatagaacacggaaacaacgagcgaaagtaaaaaaaacactgtggcagacgctccgagctgcccccaaagcacaaagcgggaaaacaaaaagccaagtacgatggtaaacaatgaaaaaacgcagtcctgtaaagaaaatacgattttttctttcgggggcggcatgaatacgggaattgcggcatacgggttatacgcggcgccgttttgcaaagatgaggatgcggcgggcccctccttccctgtttcagcgggaaaattatcgttcagtttttccaccgaagccgcccccttcctgttcttccggctcatatgccaaaatgtcgcccggctggcatttgagtacctcacaaattctttccagtgtggaaaagcggatggctttggcctttcccgtctttaaaacagacaggttggccggggtgatgccgatacgcagggcaagttcatttgaggagattttccgcaccgccatcatgacatccaggttgataataatcggcatgatgcttccccccctaaattgtaaagtcgttttcttcgcggatgagcaccgcctgctgaaacacgttcttgagaacacgcagcagtaatcccacgaaggcggcggcaaaacataaaagcagcgccaaaagccgccatattcccaagacggcaaaaataaccgctgctgcaaagcagcaataggagattacgcgcagcattttaaccgtgccggcggtaaagacggcgcctgttttgacattgcttaggattcggttcaggcaaaaaatgagaatgaaggccggaacgagcgtcaaataaaggcatatgcacagcggccagaaaattggttcctgcatggaaacgctgtcgtaccagcttgccgcccatgggataaaaaagggtgcggcaataaaaatgacaaatacaatttttaccaaagcagatgtaataaaaagcgattttggctgttcggacatggcaattcctccttttgtaaggaaataatagcatgtgactttctaaaagtcaatatatttttatcgttttacaataacaaattaccttttttaatataaatagaacctatgtgcgaaaaaaccgccaaaaaacaaaacaaacgtttgatttttataacgcgttatggtataataaagccggaaaattattactaccggcacagggggggctgctctatgaaagagcttacaaaaagccagcagaaaatccttgactatatacgtgaatgcgcacaagaggggctttcgccctccgtgcgtgagatatgcagggccacagggctaaaatccacctccacggtccacgcgcacctcaataccctgcaggagcgcgggctgatttcgcgcgaggctaagcttaaccggaccatccgcgtcagcggggaaaagaacgttccagtgccggtgcttggacgcgttacagctggcctgccgattcttgctgtggaagaaattgaaggctatgttcctgtcacggagagtattcgcaggggacgggagctgtttgcgctgcgtatagtaggcgacagtatgattaacgcgggcatcctggacggagacattgtggtggtgtgcaaaacgcccgtggcggaaaacggcgaaatcgccgtggcacttattgatgacgaggcgacggtcaagcgttttttccgggaagacgggcatatccgcctgcagccggaaaatcccgcatatgaaccgattattgtagatgaatgcattctattgggtacggttatttcgcttgtccgctattactgactggctttatataatctttatcagagttcataaaagctttttctaattttaaaaatttattcatacgctattcacactctcaaattagaataaaagcgtactctaaaagacggagccgcaccgtcagagtataatgttctaccctcctcaatgtacccctcaaactaaaaggaaaagggaacgcccggtctaccgcaaggaccgggcgttctcttgtttataattcgctttgtttacaggctgaagcctgtcagggacgatatccagtcgaaaaacgggcagagcgcaacagggaggaagattgccggcacgaagttgataaccttgagctttgcaatccccagcatattgacgccgagcccgatgataagcagcgagccgatgacggtcatctcgtttaccactgcgtcgcttaagtacggggcgacccactgcgcaagcagcgtaatggcgccttggtatacaaacacgaacgccgccgcgaaaagcacaccgataccaagtgttgacgcaaaaatcatcgcggccacacagtcgagcatggattttgtaaacagcataatatggttgcccgtaagcccgctctgcagcgcgccgacaatcgtcatcgctccgacgcagaacaggaggcttgctgaaacgaagccctccgcaatcgttgtttttccgtctgtgcgcttgcatttgctttcaataaaccggccgagcgtatttatgcgcttgtcaaggtcgattccctcgccgagcagcgtgccgagcaccatcgaaaggataacgagcagcgtgcgtttgccgcccataacgccggtaattccaataaacagcgtacagagccccagcgctttcattaaaatatccgcaaggcgctgcggcaggcctttttttaagagcaggccgatacaaccgcctatcagcacggctatggtattgacgatggttcccagcatggattttccctcttcccgttatgaggaatttccgcgcggcccgcggatgtatgttcattatagcacgccgcattccccgcgtccaaatattttaaagaaccgcacgccattttggcgtgcggttctaatattttttctattcgcagaaatattcccgtttctataattgatttaaaacatagccgtattcatcaaaaagatggggatacaacaaaaatgtagttccccatcttttgcagtcgccttttccagaggcttttattactatcagttattctgtgtttcgcccttatcctccagcagctttattttaacatcgaaggttttgccttccccgccctgcttttccggtatgcggtaaatggtaagcgtcacctcgtcgcctggctcatgctcagccagctcagaataaaagcgcgaaaagcctgtaacctcaacgccgtcaatctttgtgatgatgtcgtttttcttcacgccctgtttcggcagggggctgtcgtccgtaaattcatcgatcaggatgcctgtcggcacgccgtttgcctgcgcggtgagctttgttatcgccattccggtaatgccaatgcgcacgcggccggaaacatatccccggctgatgatgtcgtcggcgacctccttgacagattggctcgggatggcaaagcccatcccctcatattctgtgtcgacaattttaatcgtattgatgccgataacctgccccgcgaggtttacaagagggccgccggagtttccagggttgattgcggcgtccgtctgcaaaaatccgacgctgctgtcgtcaaccttccggttgagcgcggagataatccccctggtcagggaatttgagaagttgatgccgcccggattgccaattgccgcgacgtcctgcccgacctctacttcgccggaatcagcaaactcggcgggcgtaagctttttacccgcgtcaatcttcagtacggcaaggtcggtgcgcgtgtcatagccgacaaccgtggccttatattcctcctcctcggagaatgcgaccttgacggtgtattttttactgtcgcctataacatggctgttcgtcacaacatagccgtcctcgctgattataatacctgtaccctggcttgttttcgtcccgctgacgccgttttcgacagcgctgccctgttctgtaattacagcgacgacagatggattgatttttttatatgccgtcttcgagtcgtatttgtttgagtcgtctatatccttcggctgggccttgagcgtaatggacgggccatcggggtttactccggtgtcggagggcgccgcgctgctggagctgtcgtcgtccccccatccgaacaggccgctgttatcgtcataattactgctgccgtcatcgtagcctgactgggccggcagattgaaaataccgttttcaaacgccctgccgcttacaatattggtaatggtaaagacggcaaagcaaacgaccagcacgctaagcaggccgattacgcagccaagaaatattttcattccctttttcatcctgcgcttgggctgctggtacatctgcgcgtagtaatactggcccgtcgcggggtcatagtacgttccctggtacggcggctgcccgctggcgggcggcgcctgctgcgcgttcggcataccctgatagggctgttgagtaaaataaccagcgccctgtgtatttgggccggggaatggcggcgcgctttccgtttggggcgccgcctgcggagtttgcccgtaaacaggctgcccgtttaccgtgtcctcccattgatgcggctgctccggctgcggtatttcttcgtttgcagccggctgtccaggctctccctggaaagtgttttcctgcccccagccagcggtatcctgtcctgcgctgcctgcctgttccggcggctgtatcggttcggtatgatttaaactgccgccgtcctgcgccagcggctcccgcgccgcctcgccggaattgtcgttttctggaataaagccgtcgttccctggaatataatcactcatgctgatcctcctcattactcaatggcgcgccctgtgccgtgccatcctttttttccttatttggcttgtcgcccttatcctttttctcggttttgtccttgagcttcggctgaattgattctttttctttcggcagccacagagtaaagctgcaatagctgcctgtttcgcttgcggcggtaatgtccccgccatgaagccgcaggattgtctttacaatatacaggcccaggcccattccgtttttgtctttgctgcgcgacttgtctgttttataaaaccgctcgaaaatgtgcggcagctcgtcgggctggattccctgcccgctgttgcggatttccagcgtcgtgcggtcaggggcgtcagataggctgatccggatataaccgccctcgtttgtaaatttaaccgcgttttctattaaattgtagacaacctgatgaatcatatccgggtcgccgtcgacaaaaatcgtatcggcttcctcaaggccctctacacggatattccggtctcctattttttgctcaaaggtcagaagcgtcgaaattagaatgttggtcaaatcgaaccgctgcttattcatgcgaagctcgccgctgtcgatgcgggagagcgcgagcatcgactgaaccagacgggaaagccttctgacctctgtcgatacaatgttaagataatagccctgcctatccggcggaatcgtgccgtccaatattccgtcgataaagccggcgattgtggtcatcggcgtttttagctcgtgcgacacgtttgcgataaagctgcgccgcgtaccctcggaagttgcgagcgaatcagccatattgttgaacgcgatagcaagctgcccgatttcgtcctgtgaggtcacggggacacggcttgagaagtcgcccgcgccgaacgatttcgcggcctgcgccatctggcgcaggggcctgaccatattatatgtgtaaaggcctaccatacagaacacgattgcgaaggtagcgatagccgcaaaaaagaaaatttttgtgatgttggcggtaaaatcagagattgagctggcctccgacgaaacaaacgccacgcctactgctatattctgtccgtttgaattcacgataatcggtacgcctaccgtataatagttgtttttataaatgccgcccaggttcgaggtttcgaaatactcccccgtaagggcgcttttcattatagaatccggaatcttcgccctgtcgtgaacgcagtttgcaccctccgagcaaagctgagtaaggcccgtgttgtttgtgataaagatgctcgcgttgatactctttgatatggttgacatgaccgtctgcagaaagttggattggcccaatatcaaattattattgacaagcgttgagctgtcggaaattaaatccgcaacggaatgagcgttttctgtaagcagctcgcgtttgtcgttttccgaataccgcgcgacaaaaaagacaagcatcacgcccagtatcagaaagctgacaagaacaatcgcgaggctgatttgcaggtatttgctgaacagcgttcgcctgtgctggcccagcatcctattttctctcgccatattctcctatcccgtccccttatacgttaatgttacagcttaaaaacaggcagccgcacacgggccgcctgtctttaaaattataaatccgcagctgcaaggcttatgattccttgacttcaaatttataaccgacgccccaaaccgttttgagttcccatttgtccgaaacgccgtctattttttccctcaaccgcttgacgtgcacgtcgaccgtccgggaatcgccgtaatagtcgaagccccagacctcgtcgagcagctggtcacgcgtgaaaaccctgttcgggttgcttgcaagatggtataaaagctccatttccttaggcggcgtgtcgatttgtacgccgtctaccttcagctcataattagtcaggttgatggaaagcttgtcccatttgacctctttgacctggttgtcgtccgtcttgcctgtacgcctgagcaccgcgcggattcgtgcgacgacctcctttgcctcaaagggcttgacgacgtaatcgtcggcgccgagctccaggccaagcaccttgtcgaacacttcgccctttgcggtcagcataatgatagggcactgggaggtcttgcggatttccctgcacacctgccagccgtcaaggccgggcagcatgatgtcgagcataataagctccgggttttccttttcaaagagcttcaaagcctccatgccgtcgttcgcggtcacgacattaaagccttccttttcaatatacagccgcaaaagctcgcatatattcaggtcgtcgtctaccaccagtattttaccagaactcattttcatgtacctcccgttttatgttccgcatcatcattcaactgtacaggaatacttcctgccttgattataatgcaaaatgcttcaaaaataatgaacaaatttgaaatttaaatccaacaaattataaaatcccgcggttttatccgcttttttcgccttcctgtaccggacagccgtgcgttgttacatgggagcacctcccgcaggagatacaacgcgccttttccaagtctccgttttcccagcggcgcacaaggcctggctccctgataaacgggcggcacatcgatacggcggctatctccccgccgctgagtacccgctcgataacgccgggcgtacggtacccgccgacacttatcacgggtatcccggcgtcacgggcaacatgccgcgcgcccccgcggaaatagccctcgccctcttcgtcttttacaaaacgcgcaggcatggactggcccgacacaccgatacccgagctgatttctgccgcgtccaggccgcgggcgtaaagcgcgcggcagatttcgacgcattcctcaccggtaaggcccggctgcgtcaggtcgctgtaattgatttttataagcacagggaaacccgttcccacggcatcgcgcactgcgccgtatacttcgcagagcaggcgcgcgcggttttgtagacagccgccgtaatcatccgtccgcctgttaaaatacgggcttaaaaattcgctgattagatagccgtgcgccgcatggatttgaacggcgtcggcgtttgcctgcctgcatttgtacgccgcctgcgcaaactgccgcccaattctttttaaatcctgcttttccgcttcacgcgactgccccccggcaggggaggggccgagcggcggggaaccatggggtacagccgattttacaccgcagtgggcaagctgcacgcaaatttttccgcccttttcatgcacgcggcgcgtaatttcagaaaaacgcgggacaaagctttcttcgtctgtatttaccatatcgggaagcgtgcggcaatcgtttgatatgcccatcatacccgtaataatcagccccgctccgccctgcgccaggtcttcataaattttacccagcaggggggaggccgccccgtcgcaggcgcctcccatttccagcgttgcgctgcgcaccaggcggttttttatggtcaggcctccgagcgttgccggttcaaataattttttcatcagaattcccctccaaagctttgccctcattatggagctgcccggccattttgtcaaccgctgtaaaaaagcagccggcaggaaatcctgccggctgctaaaatctataggtacgtccttttaaccttcgtgacggtatttttttctcgtcgccattccgcccctgatatggcgttgcgccttgttgatttcgagaatcgtcttgacctccctgtaaagctgggggttaacgtatttcaggcgttcgcttacgtctttatgtaccgtgcttttgctcacgccgaattttttcgcggcgcttctgacggtcgcgccgctctcaatgatatattcgccgagctctacggcgcgttcctccactatccccttcaaatgaacaacctccctttagtaaggtaagatagttcatttatatgcagctgaaattcggattagcacttttggggacaatgggtaaaaagtttatggaacagcctttttgccgcgggaattccttgctatgccttaccggctgcatgaagcgccgcctgttccgcgtggatgcgcgccgtgtcgaacacgggaagcggcgtatcctcctgccggattaacagcccgatttccgtgcagccgagaataacgccctgcgcgcccttttgggcaagcgagccgataattctcaggtattcccgtttagaccgctccgataccacgccgaggcacagctcgctgtaaataacgcggttgacaagctgcgcgtcctttccctgcggcgtcagcacctcaatgccctcttgtatcaggatgtccttataaaaatcctgctccatcgtgtaaattgtgccgagcagggccgcgcgttttatattgcgctgcttaagccgccgggcggtcgcctgtgcgatatgaaggattgggatatttatattctcctggacctgcggcgccaccctatgcatggtgttcgtgcagatgacgatgaaatccgcgccgccgcgctccaggctctttgcggcctgtgttaaaatggcggcgcttttttcccagtcgccgtctgactggcagcgctcgatttcgtgaaaatccacactgcaaagcagcaccttcgcgctgtgcagcccgccgagctgttcctttatcacggtattggctgtctgatagtatgtgacggtgctttcccagctcatcccgccaatcattccaattgttttcataaaaatccccttctgccggttcacaagcccgtggtcagcacagcagcttaatgagcaccggcgcaatataaaccgccgcggcagcgagccctgcagcgccgagcgtcactaagaagcacgcgcgctcaagcgtgccgcagacgctgcgctttttccgccggaacacggcgtagccggtacaaagcagcacacccgcgccgcagataatcaggcccgcccacatgccgcccggcacaaaggtcaaaacgacatgggctttgccctgcggcagctttatggacatccatccgccgaaaaccctgttgatttcggcaggctccccgttgaccgtggcggtataccctttatcatttgggaaaaagagaatcagggcttcgtccttttgcgcggtgcaatcggattcgattgtattcccattcacctggattgcagccgtacgcgccctttgcgcgatattttgaagtgccgcttccttgagcccatataagccgaacgacttacaggcgaggctcttgttgagctttaccacgacgcgcaccgtttcgttttcgaaggagcctagctctaaaatcccgttttcctgctgggacggatagctttcactgataaccctgccgtccgcctcgacggaaaccgcgccgtttacctcttcgacaagggacgtgcttacgcggtcgaagcaatcgaaataaagcgtagtgcgctgcccgacgggaatttcatatacgagctcgcttccggtccccttttccgccgttatggtatagccctttcctttgcggtagcttacagacgcgttcaccgcctcccgcggctcatagcgatgaaacagtcccgtttccccgaacagcttttcacacaggtactgctgggtttccagccttcctgtcctcggcaatgtttcatgatttgacaaatccgagccggtcaagagcgccggcggcagaaacacgtcgttttcccggatagcaaaagaagcgttacggtaaaacgcgccgtcaagcaggggggacccaatggtgtagcggtttgaaagcagcatatcggaaaagagcgtgccgccgcttgaagagacctccatccagtaagcggaatacccaagctttttcattgtataaaggtaatcttctgacgtcagggaggaataatgcccgagcgtattgtatccggccgcgccagtaaggttgacgtcgtaccgctttttatcggtttttacccggtaaaagccgtcgtccgccgtttttccagccaaatccattacctgccggtaggacaaatcgtcatggcgcggggccgccaggtatacgccgcagttgagcatgcattcacacacaagcaccagggcaagcaagccggccgccgcggggacgcgcagctttccctttttccatacgtaaagaatacatccgtacgcgccgcacaccagcaggaaaacgacgcccaggatgaaaaacgattccatgtctccccaaagcgtttggatgtaggcctgcacgccggaataaaaaaacaaaacgatggcagcggcgccggcgcaaagcacggcgcaaacgggcaaaagaaccgatgccgtacggcggctggctatacggcgcggctcatgctgcgctgacagcctgtccatggcaaagccgagcagaacaagggcgaaaaacgccgtcatgtatccgtaccgtgcggggaacgccatgtaattacccgtatgccacattttgttgacaggctccacaacgagcggaacagccgtcagaaggaacagggaaaaatacagccggatatcccgctccctcaaatgccggacagtcagcaaaatcgcggggacgaaaaccgccgtgcaaaacagcagcggccataccgtataaatatagccaatccacgcacccgatgtgatgctttcaatcaaacctactgtgcgcgcggagctcatatactgcgaaagcgccggcatccagaacggggcggaaagcaggcaggcgcagagggaggatatacaaaaggttgacgcggcgcgctttctgttttcctgtttatataaaagcaggaacagccccatataaaagaggatacacagaacaagcatatagctcatgtagaaattgaccgcgatacacagggtcagcacaattatataaagaagcggcttgtctttctttgccagacggtcgagagccagcaccaaaagcgggaacaggtacataatgtcgagccacatgacgttctggtaaaaaagcagggcaaagccgcaaaacgcgtacatgacaccgaggattacgttacagtaccatttgaggcgcggcagcctgtaccggaagaaaacgcttgccgccagcgcgcaggccgccatcttgagcgcaacgagcacgttcataaaaagctgcatgtcctgcttgtccacaaacacagtgagcagggaaaacgggcttgacaggaagaaaagaaaaacgccccagaagttcattccgccgccgttttgcatattgaggaacaaattgccctgtcccgagaggatatcctttaaatcgagcaaaaacggcagcacctgctggttcatatcgcaccaggagattgcatattttccaaacgggtaaatcccagtaaacgtgaaaaataccgttaaaagtaaaagcgccgcaccgggcgcaagcaggcagacagcgtaattttttattctttgctttaacatcgcgtcgtcctttccgcgcgccgcgtgcggcaccttccatttttgtatacatattaacagaacgaacgggcgcaatagggcgaaccctgtctgcgcctgtttattccgctgtttccctgttataaaggggcggctgcgtctcgtagatattgctgccttcgctgtcgacgacgacaatgcaggggaagtcctcgaccacatagcgcctgactgcttccgtccccaaatcctcgtagcataaaagctcctcgcttttgatgctttttgcaatcagcgcggccgcgccgccgattgcggcgaaatagacgccgccgtttcttacaatcgcgtcgattacctctttggagcgcgcgcccttgccgaccatcgccttaagcccccggtcgagcagggcgggggcgtacttgtccatccggtagctcgacgttggcccggcggggcctaccgcgtgcccgggctttgcgggcgcgggccccacatagtaaatcgtttctccctggatatcgacgggcagctcttttccctgctcaatcagctcatacagccgcttgtgcgccgcgtccctgccggtgagcatggaacctgtaagcagcacgctgtcgcccgcctttaatctctttatatcttcctcccgcagcgggagcgtaagctttttcattgaaacccagtcctttcccccgtcaaataacagtgctcctgtggcgtgccgcgtggcagcagatgttcaccgccacgggcatccccgcgatatgggtggggaacgtctcgatattcacgcccagcgctgtctgtgtaccgcccagccccgcggggccgaagcccatccggttgattctctctaaaagctcgtcttcaagctgcgcgtagcgcgcgtcgggatgcttcgtatcgatggaacgcagcgtcgccttttttgcaagcagggccgccttttcaaacgtgccgcctatccctacgccgacgacgattggcggacaggggtttggccccgcgttccttacggtttccagcacaaaatcctttataccctgtacgccataggacggcgtaagcattttgatagcggacatgttctcgctgccgaagcccttgcctccggcaagaatagaaatggtattgcccggaacgattttcgtatggatgaccgccggcgtattgtcctttgtattgaccctgtcgaacaccgggtcgcttacgactgatttgcgcaggtatccctgctcataagcctgccgcacaccctcctgcacggcgtcctcaaagctgccgccctcaatcgcggccttgtcgccgtactctacgaacagcacgctcatgcccgtgtcctggcaaattggtatttgttcctttgccgcaatttcgttgttttcgagcagctgggaaagcacggttttcccgacaggggattcttccttttcgcgcgcgttttcaagcgcacgcgtaatatcctccccgatataatagttgcagtcaataaaaagctgcctgacggcctgcgccacaactgacgcgttgattttcctgatttccatttctgcaggacccatacccgccaccttcttataaataatctaattttattattataagcccgcggacattgtttttcaaccgttttcataggcagggccggaacggtgaattccgttccggcccctgagcctctttttcatagccttccaagcttttttaccggagagcgaacagtgtgtacgttttaccggattccgttttaaactgttcgtccgggacgaccgcggcgttatccgacacgccgctgatatctattttctgtgtggcgttcccatctgcgtcatagaactggacggtactccacattaccatagacggcaggctgtagctgaaggagccgtttttcttttcgcacttgctcagctcgccgaatttcgtgtcgaagggcatctgcccatctcccatatcgacaatcagggaacagtagatattttcctggtcccagccttccggcggctggaacgtaacggcagccgaggtgtgttccttgttttttatttcctcaatctcacctgctgagaaggtgtttttgtaggtggatgccttttccgggtcaggcacgcggaaaagctcctgagcgtagctgtctttcttcagctcatcagcgtctacaggccgcatcataaaccggccgagtagctcccatgacctctcataggtctcgggtacgttgaacactttcaggtaagtatcgtcttttacctggcagcctaccgcaagctgcaccacgccttttccctttgccgtataggcgttgtacgaataaaccccgtagctgtcatcctccaggatatcctgccgcagcgctgcggcaagctcggaaagctgcccgcggtccgtaatcgtaacgcccctttcgctgggggtaacggcagcctccgcgtcgtaataaaaaccatccgaattcgctgttatataggtcaggtaattgttttccagggtgaacagtacgtttgtctgttttttatattcctcagacgaaagcagcttctgtacgcttccgctgatttcctccaggtcatactgcccctccttatattcccttaaaacggtggagccgttctggaacgtgtattccatactgatttttttcaggttgtattgaccttcatcgccatatccataagagttgctccccgaatagagcgtgtacgggtagcctagcttatccctcaggccctccgtaatttcgctgtgcagggctacgacctcttctatctgctctttgtcctcgaactttgcggaatcaaataccatatcattgttattagcgctgtcggtgactgaactgtttacgacaaaacgcacgcttttgacctcgtcggcctttgggacgtatacgtcgcacccaaacaggcctgtcacaatgatggaatagccggccagcacaatagcgagaagcacgccgtaggggatgagggatttcaggaacccttttacgccgcggttatagataaacgtcacgaccatatgcgtgataaacgagccaatgaccagcccgataacaaaccagaggtgctgctgcatgacattgacatcgcggacgcccgtggaaatcgaaccgaaaatcaggccgaacagcaggcctatcgtaacgcaggcgataaaccgcacgacgaccgcgggcaggcggaacgcaaagcccgcctgggcgctttcagccttgcggcggcgggacagcaccacgcagccagcaaagcacgcggccgcgaggataaaccagcataatagctgcccgggcatttcaaagagggtggtgccgttataccttgacgttccagacagcgccgacgtgatgcccgtaacatacggggaaaacgccgtgtaagccactacggacgggttgaattccgttataacgcccggcaggatggtcgtgctcatcagctggcagattccgacggcggctgggtacagcccgttgattgcaagaacagaaatgaccatatcggccgtggtgccgcagcatacggcgataaatgccgtaaacgtataggaaacaactgtggcggtaaccaggcagagcatggcgttgagaagggcccagattgcttctgtgtggggcaggcacatcggtatgcatacccccgtgaccacgagcagcgggacaagtaaaatcgtaaggcccgcaagatagcgcgagaagaagagcgtgcgcctgctcaccggcagcgcgccgaacatgtctacgctgcgttttttatgcaggtagctgaacataaagacagaaacgagcagggtgaaaagcatcaggatgcagccgaagataatggggtaaaccgtgttgttcgcttctatcaggaagtccgccctgtcaataatgtttgccgcggtcagcgtattgtaaaagagcagaagcagcggaaacgaaaacagtaaaaacaggctgtatgtgataattgtcgccatatttttccgcatggaccataggtacatgctgagaaactggtgcgttttactattgcatgatgttgttgatgtcatatcccgctacctccatttcactgataaatacttcctcgagcgtcaaaggaagcgcttcgataaatacggggttcaaggcgttcatctttgccatgagctcctccttgtctccgcgcgccacgagattgtaaagcaggcccctcttctggatgtcgatgatatcgatatttgcaaaagcgccgtcgggcagcgcgcttgcaaacgccgcctgcaccttgtggatgccgagcttcatctcgtcgagctccttctcaagaacaataccgcccttatgcagcagccccacgtggtcgcatatgtcttcaagctccctcaaattgtggcttgcaataacgaccgtcatgccgcgcgccgctacgtcgtccatcaaaagcttcttcaaaagctggcggatgacagggtcgaggccgtcgaatatttcgtcgagcagcagatactgcgggcagcaggcaagcgcaagaatcagggcggcctgccgctgcatgccctttgacatgttgataattttggcctttgtgctgatggggaagatgccgcaaagctgcttgtatttgagttcgtcccacgtagggtacagccgcctgtagagcgcggcggtgttttcaacggttgaatcgttgaaaaagtacgggtaatccgagataaagtagacgcggctttttacatcctggtcgtcgaagctcggcctgccgtcaatacgcacggtgccgccgttcgcctcataaacgcccgcaagaatacgcagcagcgtcgatttgcccgagccgtttgagccaaccaggccgaacaccgaacccttgttgatgttgcagttaagccggtcgagagcctttacctccccaaacgttttggtaagattggtaatcgtaatcatttctgaccctccttttgcgcaaaggtatcgtcgatgacccttttcagctcttcctttgtaataccaatgtcgcaggccttcctaattgctttcgtcagttcgtcaagcgccgtcgccctttgcagcgatgcggccgttacaccggatgacacgaatgatcccctcccaacagcagaatagatgatgccgtcccgctcaagcaattgatatgctttcgagacggtgtttgggttgacgccgagctgggtagcaagcgagcgcacgggcggcagctgctcctccggctgtaaaaccccgagggacgccaggcggacaacattattataaagctgttcgtagattggctccctgctttggaaattaagagtaaacatcataatctcccttccaaatcattgttgtattagttgaactatttgtattacttcaagtagtacaataagaatataacacgcctctctttaaattgcaagcccttttttaatttatttttggagcgggaagaaaccgtaaaagcttggcgcggcttctttcctgtatttttccatcatataaataaaagtgggtttttcctgtcttataaatccatgggtgtttgtcaggaaaaggggaacagaaaaggagctagacgctgtgcttttagcaatttcatcaaaaagtatgttaaaatagtaacaaaattgacaatctatataaaaattgatatgattgacttaacaaaatatgaaagaaggggtttttatgacaagcgtacaaagcacgcctttgctgctgctcgataacagcaatatgatgtcggtcgtcaatcagggggagtttaaatgtaccaacctttcctttgaggaagcgaaggccattatcgagatgcacgaggaagccgacgtcctgcgctgttttgacgacgacggaatccagactatcattttcaattacctggggattgagcgcagggaattcccctataagcatatccgcaacatgcgccccgggcaggacgccattgtctttaagctttacatcaccccgtccgaaacgcagccggtcattacgaccgccgacggcgtggaggcaaaaaaaatccagaacgtttatatctactgccagtatctttcccgcctgaaataaaatgtaaccaatataaaggtgtggcgcggcttataagccgcgccacacctttttttaatccttttccttcggctttgcgaccagcgcgccaatcaacccgaagacgattgccgccgtaatacccgctgcggcagcggtaattccgcccgagagcgcacccatcaggccgtgcgccgtaaccgcctttttaatgccctcggccattgtatagccgaagccggacagcggaacagtcgcgcccgcgcccgcaaaatcgaccagcggcttgtacagcccaaccgcggtaagcacgacgcccagcaccacaaacgtgacgagaatcctcgccggcgtaagctttgtcttgtcgattaaaatctgcccgatgacgcagattaaaccgcctacccagaatgcgtttaagtaatccagcataatattcccggcctttcttttatcattggaattttttgtgttgtaattttattcttgaccgtttttttcttcctattcatattgaaaaaaagggggtaagatgttaaactgtattttaatgtggtaatctggcgaaatctgcggatttccgccggaaaaggcatgcggcgggcctgcttttctttgcgcagctttttctttttgtgccgccggatgaatagatatagtagatgaaagcccacatgctatggagggattttatgaaacagactgaactgaaattcccgtcgtccccgtttcgaacgcggggaggcgcaaaggttccccaccggaagaataccgcttcggcgccgtccgccgtaatgccgccgccgaaggaggtcgttatcccgatgcagcagcatatcggcgcgccatgcaagctcaaggtaaaggcgggcgattatgtaaaggtgggcacggtcatcggggacagcgacgcatatgtaggcgccccaatccacagcagtgtctcgggtactgtcaaaaaggtggcacaggtaaagctcccgggcggaaacgcctgcgacgcggcggtgatagagtccgacgggcagatgcttgtgaacgaatatctcgtaccgccgaatgtacataacctttccgacctgctcgcggccgcgcgcgcaagcgggcttgtcggccttggcggagcggggtttcccgcgcacgtgaagctcaatattccggagggaaagacggtcgatacgctgattataaacgtcgcggaatgcgagccgtatataacctcggaccaccgcgaggcaattgaaaactcctgggcggtgatgtcgggcgtgtacgccgtcaaggagcttttgcagatagagcgcgtgataatcggcgtagaggacaacaagccggacgtcatcgaggtgctgcgcgaaattgccggcagcaaaacgaatgacccgcaagaccatgtgcgcgtgctgcccttaaaggcgcgctacccgcagggggcggaaaaggtgctcgtcaaggcgtgtaccggcagggtagtacccgccgggaagctgccggcagacgccgggtgtatcgtgatgaacgttacgtctatcgcgttcctgtcgaactatttgaaaacgggaatcccgcttgtatctaaacgcattacggtggacggaagcgcggtgaagaacccgcagaacgtcatcgtacctatcggcacgccgattaaggacgtcatagagttctgcggcggctaccgggaaacgccgagaaagcttttgatgggcgggccgatgatgggtctggcccttgccgacgactcactgcccgtcttaaagcagaataacgcgattttggcgtttggtgaaagggacgcaaggctcccggagccttccgcctgcatccgctgcggaaaatgcgcgctgagctgcccgatgaaccttgtgccgcccgttatcagccgcagcgttaagctcaaggacgcgcaggcgcttgaaaagcagggcgtcatgacgtgcatggaatgcgggagctgcgcgtttaactgtccggcgcataagcatatcgtacagaatatgaggcttggaaaagccattgtgaaggaagccgccgccaaaagggccgcgcaggggaaggggtgagcaggatggatacaaaattttatgtttccccgtcgccgcatctgcgcagcggggtaagcacggcaaagataatgggcaacgtgctcattgccctggttccggcggttatcgcttccgtcgtgatttttgggtggaaaagcctgctcgtcatcaccgtatgtacggcaacggcggttttagcggagtatatctgccgaaaggtaatgaagcgggacgataccatcggcgatttgagcgccgtcgttacgggcgtactgctcgcgctgaacctgccggtcaatatcaacctgtttatcgcggcgttcggcagcattgtcgccatcgtcgtcgtcaagcagatgttcggcggaatcgggcagaactttgtaaaccccgcgcttgccgcgcgtatcgttttgctcgtgtcgttcccggtccatatgaccacctggcccaaggccttctggtatttgcagggtacggcggacgccgtaacgagcgcgaccccgcttgcgaataacgcaaacggcgtatcgacgagctaccttgatttatttttaggcaccaccggcggatgtttgggtgaaacatgcgccctggcgcttttgctcggcggtatttatttagttgcaaggaaaattatccatccggctatcccggtttgcttcatcggcacggtattcgtgctgtcatgggcgctcggccaggacccgctgttccatattctgtcaggcggcgtcctgctcggcgcgattttcatggcgaccgactatacgacatcccccatgacgactgccggcaaggttgttttcggcgtcggctgcggcgttattacggtgcttatccggctgtacgcgaaccttccggagggcgtgtcgttctcgattatcctgatgaacatactggtgccgcacattgagcggctgaccatgccaaagccctttggagaggagaggaaaaagcgtgaaaaatcttaacgcgaaggcaatccttacgccggtgctcgtgcttttccttatctgcctgatagtggcgggcctgctcggcggcacaaacgcattgacaaaagaccccattgaagaacagacacagctcaaggcgcagcaggcgcgaatgactgtcttgccgcaggcgaaaagctttgagcaggttacgctttccggtacggatgcggagtgctacgctgcgctggacggagaaaaaagggttttaggctacgccattacgacggccgccaagggctacggcggggacgtaagggtgatgaccggaatcgacgcggcggaaggcaaaatcaccggcgtttctatcctgtcccaaagcgaaacgccggggctcggcgctaacgccgtcaagccggaatttaccggccagtacgagcaggcgctccctgaaagcgggtttgacgtcataaagaacgcccagccgcaggatggggagattgaggcgatgaccggcgcgaccatcacgtcgaaggccgtgacgggcgccgtcaacgaggcggtttccctgtatacggaaaatcttacacagggtggaaaccacgcgccgcgctatacggttgcaaaagagctaaaggaatttatccaggacgaaacaataaagcaagagatgggaggcgggaactgatggcgaagaaatcgttgttccaggagttttccaagggaattatcaaggaaaaccccgtgctctgcctggtgcttggcacctgcccgacgctcgctgtcacgacagccgcctcgaacgccattggcatgggggtcgcggcgacgctggtgctcgtctgctccaacgccgttatttccctgctgcgcagggtgatacccgacaaggtgcgtatccccgcttatatcaccatcatcgcgggatttgtcaccatcgtgcagatgcttgtcaaggcgttcgccccggcaatcgacgaatcgctcggcatttatctgccgcttatcgtcgtcaactgcattattttagggcgcgccgagatgtacgcgagcaaaaataaggtgattccgtctattgtagacgggcttggtatgggcgtcggctttacggccgcgatgcttttgatggggattatccgtgaatttctcggaacgggggccgtgttcggcgtaccgcttacgtcgggactgttcgacccggttttaatctttatcctgccgccgggcggattctttgtattcggaatgctgattgcgtttgccaataagctaaacggcaaaaagaaagagccggaagaagccggctgcgcgggctgcccaatgagccaaagctgcgcgaaaatacagcagagtgaggagggcggcagatgaacgtacaacagcttgtcgccgtattcctcgcggcaattctgacggaaaactatgtgctgagtaaatttttgggcatttgcccgtttttgggcgtttccaagaaggtcaacaccgcagttggcatgagcgccgcagtaaccttcgtcatggtgctcgcaaccgccgtcacctacccgatttacgagaacctgcttgtcccgaacgatttggcctatttacagacgattgtatttattctcgtcatcgcgggattggtgcagctggtcgaaatcgtgctgaaaaagtatatgccttcgctttacaacgcgctcggcatttacctgccgctgattaccacgaactgcgccgtgctgggcgttacgatgctggtgctcgaaaaggcctcgggcgacccgtcctatacttatgtatctgcgcttgtaaacgcattgggggcgggtatcggcttccttgtggcgatggttatgttcgccggcgtacgccagcggctggaagagtacgacataccaaaatgtatgaagggccttccgattacgctcgtcgcggcgtcgctcgtttcgctgtcgtttttaggctttgcgggacttgtagacgggctgatgtaacgggcaatgaacaattcttcaaaaaggaaggggtaaaccgatatgaacccgatattgtttgctgtgctcgtggttgcgggcatcgggctggttgtcggcatcgtgctggcggtggcgtccgccgtgatggcggtgccaaaggacgaaaaggccgaagcggttttagaggtgcttccgggcgcaaactgcggcgcgtgcggcttttcagggtgctcgggctatgcaaaggccctggcgcagggcagcgcaaagccggggctgtgctcccccggcggcgaagaaacgacaaaagcggtttccgagatactcggcacacaggcggaaaaaacggtaaagcgctcggcggtcgtgcattgctccggaagccttggccatacggaaaataaaatggattaccagggtatttcaagctgtgccgccgcggtacagcttggcggcggtcccggaaaatgctcatacggctgtattggcctgggcgactgcagggcggcctgcgaatacgatgcgattaccgtatgcaacgggctggcggctgtcaatccgggtaaatgcaaggcctgcactatgtgcgtttccgcctgccctaaaaagctgatttcaatcgtcccggtcaaaaagcaggcgcaggtgctttgcagcagctgcgataaaggcgcacaggcaaggtccgcatgcgcagccgcgtgcatcggctgtatgcgctgcgtcaaggcgtgtgagtccggcgcaatcacggtggaaaagttccatgccgccgtcaacccgtcgctctgcaccggctgtatgaaatgtgtggaatcctgcaagcagggctgtattgtagaggcgtttgcctgagggctggaaatatgaagggaattctatgtttgtaagggtatgggacagtgcgcatggcggttattataaatccattgtttatggaataatcgacacaggctattttgaaaaatatgtcgttttgaatccgtttgacaactcgtttgaggccgtagattatctggtcaagggcggggagactttcgccggaaaaacaaaaattaacataattaacgccgaaaccaaggactggtaccgtttctttaacaacgacctgttaaaactctcccgttctatggacggttatgaagttcaaaatagggttccggtattttatgggtatgaggatgtgtttcagagcagggggtttttgtttcagcttttaaagaacaggaccgtaccgcgtggtgaagccgcctttgcggttcgctcacttctcaatgagaaagattggcatactattgaaacacaggaggatgccgacaaatttatgagcctttttatgggatttcatgattctacgctggaacggtgttgttacgaggagggggatgacaaaagagaccttcacatgatatttgacaacaccggctggtacggtgttgtggagttcttttttgaagggttgttagacatgcatatcaggcctcccgaagacaacacgaccagagaacttctatcgggctgcctgctggtgtatgaggagagcgtgtattgggcggatgaggcgcttcagaaagaagacctttcctatcatggcagttatgtaaaagcctatagcctgaaatggaaaaaaataagttgaaaagaaaccataaataaaaagccgcaggggaattccctgcggctttcgctgtttttgttttacttttatccggggattaccccctgatggttttatcaaccatggcttcgttttgcggtaaaatcctttgaaacaatctggaaaacggtggttttatcaatcaacgcgtcgttgaatgcaaaaattttccggcccgtgagctgctccaagattgcaagcagggcctcccgcttctcgttatgtcccgtaatgaaggaaacggtacccgtcccgattacgctttcataagcgcaggtgtaggtgcaggcgatatcgtgtttgccgatgaccttaatcagccggtccatctcaaagccgacggtcgggttttgctctaaaaggtccacctttttgccctcctgcgcacagtgcaggtaaagagtcagggtatctccgtcgagcgtatagccgaagttcatcggtacaaggtagggcgcgggctcgtctgaaagcgcaatacggcagacggggcatccttttatgatgtccgcaatctgcgcacggtctgtgaccgcacgttcatttcttttcatgtagtaatccatccttttcattttctttctgagttctgttttaaggcaacagaaaaccaaccaccaaacttaattaaaacagctctgtcgcggggtcgtaccgctcgccgttgaaccagcattcaaaatgcaggtgcgcgccgtaggaattccccgaattgccgatataaccgataatttcaccctgctggacctgctggccttcctcggcaaccaccacactgcaatgagcgtacagggtggagaagccgccgccatggtcgaccataatatagtagccccaaccggagccccaggagtccgtcttgttcgcccggatgaccgtgccgctctgcgccgcgacaatcggtttgccataggcgctgccgttgcaggcaaaatccatacccttatggcttctgtcgtcgccccagtaggaggtgatgacgttgcattccggcgcgggccagatgtagccgttcgggcttgggctgccgtttataatcccgccgttttgcaggacatactgcttatgccactcggacagctcctgcgacagcttatcctgttcttcggagtttttctcaagcttgctttcaagcgttccctttgtttttgagagcttttgcagcaccgcgtcgcattccttctgtaaagcgtcgagctcgtcgtgcttcttctccaaatccttctttgactgggaaacgacgtctttttcccgctcgatttcctccttttcatcctggatgcctgagagctttttctccagattggcaatcagcctggaatcgtaatcggagatgctctctatcaggtacgctttatcgagaaaatcatcgaaatcctttgcgccgagtatgatttcaagggcagaggcgtcgcccgccatatagacggcgcggatacgcctgcccagcgtttcataatcagcgtcgatttccgcctgctgctttgcaatctgcgcttccttctgcttgacttgtttgttgaagtctgagattgtggaggtcaataggtcgatttcgtcctcgaccccgccgattttctcctgaagcgcttttttaagctcctgctgtttgcctatgcttttgcgggcctcctcgagctgcttgtcgagcgcttcctgctgctgtgacagctcctgctgcttttgcgtgaattccgaaatatccgtaagcgcagaagctgccgaggcggtcagcactagggccgcggtaactatgcacagcgcgcgccgggccaaacgcttccaactcattggaaccagtcctttcctttattaataaacaaaccagcctgtttttatcgaaaaacgccagcaaggtcaaaattcgataattctctagcataaatttagcataaaagaaataattttgcaagaaaaatccccattttactcataaaaactacaaaaaacgcaaaaacagtggggaatattttcacagatgagacgatattcccataaattggtatatggtaaatatataatataaaaaagtgattgtttatttgcttttttatctgccggaatgtttcgcaaaatagcagattgtgggggaaaacggatgaaacgaaaaaaagcggccagtgtcttgctggccttgttgtttttagccgcggcgttatctgcggcgcctgcttttggagcgttccaggcagatacgataaagatgcccgtcccggcggttggcggaggagatacaaaaaacaccgggaaagccaccggctgctatctgctgggggacgtcaattttgacgggaccgtcggcgtgctcgacgtattgctgattcaaaacgacaaagcgatggtgcagccgcttacccaggagcagaggcgcagtgccgatattgacggggacggcgttcttgcgattctcgatatccttcatattcaaaaatttcttgcggggatgcttgtggaatatccagtcggccaatgggtagacgccggaggggattttccgacggtaccgacgcaggataatacagaaccgccgaccatacccgtaacctatccaacggacgccccgacgcaagagccgacggtgccggcagccgatacgacagaaccggccgggccgaccgaggctgcgccggaaaacagtaatccaacagattcaaccgccccggccataccagagccgacagcacctacggccccggccgggccgccgtctgtcggccggaaagaaatgagctacctttatctgcgagacgaatcgggcgcgctcccaagcggcggccggatgtgggtatatataccagagctcagctatgcggtggaaatgaaagagatgcgcgacggcgttacctaccgcgctgaaatttcacgcgattggggcagtcttgcgttttaccagacggcgtcgtccgttaccaggcccggtaatccggaacagcttccggcgggcgagctttggaacgtatgggccggccttcccgcgcgcgggaagaacgactgttttgctataggcggggaaaacgcgggcagctggacggcgtatgatcctaccggggaacggaccgtttattttgacgcggcttccggcggctggcaggacgcctatatttacggctggtcgtttgggcttgaccgtacgtttgtcccaatggaatatgttgcggatggggtttataagctgattcttccgcaggcgcccgctgatggggcaaaggggatagtctttttgaaccagggcttttgggacggcgcgttcctgacggaggactgcgttatggaagccggtaaaaacttttataccggtgtcaggaaagccggtgaattatggacaggcatatgggccgtctatcccggatagcccaaattgatatttgtttacgacagaaacattttgtatttctttcttctcgtcgccgcccttctttttgaagggcggcattctttttgtggtataaatttttcagttacgataaaaagccggaacaaacgcccgtatccagcaaaataagccataaagtacaatcctgttatgacaaaatttttttatggctcgtcctataatagctctactgggaatcaaaaaaacggcgggacggtgaaaggcgcatgaaaatacagcgggcggcggccgcaaaagggttttttgaacatacgatggcatccaagacagcgcgtaccctggtgctgcagggtgtatatttcttagcgggaattctggtttccggcggagctgtgtttggcagctatgcgccgtttggcgcgtctatggtggcggccgtaccgtttcggaacctgctttcttcgcttgcgggtacggcgctcgggtacataatgttttctccaggggggagcttccggtatgtagccaccgtactcgcggtcagcgcaatccgctggacgctttctgacctgcaaaaaattaacaggagccgttttttcgcccctgtcatttcgtttatcccaatgcttgcaaccggcctggtgctcgcggccgttggcagctttgcgggaaacctgcttgcaatgtgccttatagaagcgcttttgtgcgcggtcggcgcttacttttttaaccgcacgattacgctttcggcgggttcgcgaggaattaccaccttcaaccagcaggaaattgcctgcattgccatgacaggctgtattttgctgctggcgttttccagcatatccgtcgcgggcatttcgcttgggcgtgtggccgcggtgcttgccattttgttctgcgcgcggtacggcgctgtttcgggcgggtgcatttcaggcgtggcgaccggcgtcatattcagtatgacggacagctccctgagctttgtcgcgggcgcgtacgcctttggcggcctgatggcggggctgtttgcgccgacaggaaaaatagggacgattcttgcgttccttgtgtgcaataccgtcatggcgttccagtcacagaacacgaccctgattctgacctcggtttatgaaacgctgattgcatccgtcgtattttttctgctgccaaaggaccttggaaaccagctttccgccgtgttttccccgccggtcgataaatcgcgctccgagggtctccggcgtaatgtaattatgcggctcgatttcgcggcaaaagcgctcggcgacgtttccgcttcggttgacaacgtagcaaaaaagatgaaagagctgttcgcgtccgacatgagcgccgtctatggaaaggcggcggaggatacctgctcccactgcggcctgcgcgtttattgctgggagaagcagcgtgagacgagcctcagtgactttaacagcttgagcgattccctgcgcaaaaaaggaaggattgaagaaaaggacttttctgaccgttttatgaaaaaatgctgcaaaacaaaagaaatggccgcagccgtcaaccgcaactacagcgcttatacggcgtttctggcggcggagcggcgcgtaggcgaggtgcgcagcgtcgttgcggggcaattttccgggctgagtggtatcctcggcgaaatggcggaggaatttgaaaactacgagcattttgatatggctgccgccgaacgcgtgagcacagcgctcaaaatggcgggattaacaccgattgacgtaagctgccgcatcgaccggttcggacgcatgacggttgagatagaaacggttgacaccaaccataacagtatgaaaaaagcacagctgctcaaggaaatttcaaaggcctgcggaagaaggcttgacacgccgtgcctgagcatggcgcccaaccgctgccgcatgcagatgagcgagcgcccctgtttcgatgcccaggtgggaagctgccagcatatcagcggcaatgggcagctctgcggtgacagctataattatttcaatgacggaatgggccgttttgtcgcaattatcagcgacggaatgggcacaggcgggcgcgccgctgtcgacgggagcatggcggaaagcattatgaccaagctcacgaaagcggggcttgggttcgactgtgcgctgagtgtcgtcaattccgcgctgatggtcaaatcgggcgatgaatcgcttgccacgctcgacgtcgtttgtatcgatatgtttaccggcgacacacagataatgaaggcgggcgcgccgctcaccatcgtccgcaaaaacggcaggacctaccgctgcaacagcgcctccctgcccgccggaatattgacagacatcaaattttcacacgatacggcgacgcttgagcttggagactggctcgtgatggtatcggacggcgccgtggcaatgggcgatatgtggctcgaatcgctcatcgagcattgggaggagggaagcgcccaagcgcttgcgaaaaaaatcgtagaggaagcgcgaaagcggcgcaccgacggctatgacgacgatattactgcggttgcaatcaagctgatgcgtaactgagcatgataaaaaacgtccgaaacggaatttccgtttcggacgttttgttctataatattccagttttactgctgtacgggcgcattcctgttcatcgctccgccaaccaggtaaaggacggggagtaccaggccaatcagggacatcgggctgaatccgccgctggtgattgtaattaccagcgaaattacctggataatcaccaggataattccccagataaagcaggtcgaggaaatctcgttgcagcgcttgactgctaccgcgccggcgataatcagtagaatgctggaaatcatggaaataatcgccgctacagtagccaatgcgccgagtgccgcccctgcttccagttcgcccgccgccgcgccgagcgcgccgagaaggcctccgccaagcaacagcatgatgctgccgataattccgaaaataccgaagatgatgttcagaataccgacaaccttaagtaaagttttgccctttgcgttcataatctatcctccaattatgtatttggcataatagccaaaaccattatatcacgataaattacccttgtgcaatagtacatcggcaaaaactccaaaatgtgttcaatcaagagcttaataaaaaacacccgggtattttgcccgggcgttcttttattttatgagtcaaacacatcacttcccgcacccgcgataactgtaaacgctttgggaaggttctcaatctcaacggttttatggtttccgccgttttccccgtcgagcgtccagccgatgggttcctgcgcggtaattacggcatgcgaagcacggattacatggcagtagggggaagagaagttgcgcttcataaaatccgcaaccatgttttgcagctcgattggattgttcgggtttttaaacaggatgacctcgaacaggccgtcgtcgagctttgctcccaatccgcccctgtccttaaagccgccgacgcttcgcgtatttgtgaccatgccgaggatataatcgccctctatagtgccgtcgccgtagtttaccctgatatgggagggcttgatgttcggaagccggcggataccttctaacaggtatgccgcgtgcccgaagatgtttttaaacttctgcggcgtatcgtaggacacgtccgtaaacgcgccgaatgccgcgatataaacaaaattaccctcgttgaaacggcctgcgtcacaggcaaacggcttgcccgccagaacattttgcgcggccttgacaaggtttttcgggatgccgagcgtggaggcaaaatcatttgtgctgcccgctgggatatagccgagcggtttcctgttcccgggagggagagtcagaaggccccgtacacactcgtttaaggtaccgtcgccgccgcagacgaccagcaggtcgaagcagcctgccttttcgcaggtggtattatatgcgtcgtccggcccctgcgtcggacgaaccgttacgtcgtagcctccgccggcgaagacgtcgatgatgtcgctcaatcggctttttacctgcgccttaccggacgtgggattataaatcaacagtaatttcttactcatacaagcctcgcaaacgtagggattacctgtcctgcggcacagacatctcacgcacaagcgtggggatatcctccttacaaggcgtgaatttacacgatacgaaatggcatatcgatttggtggaggaggaaatattccgaatcatgccggacaggtttttatgggtcaggtgtgaatggatgatattgaagaagtttgcaaacaccattgcaaacgcaagcctgaagtggctgagccggtactctttgtaacagccgtttttttcaaaaaaattgcgcagtacgccgagggaacgcacgtaatcattgagctttttgaaatcgagcgccgatacgatgctgttgctgcgctgggtgtaataataaaggcatttatcgatgacaacgaccctgtccgcacgggaaagcaggcgtgaggtcgtcgcaatatcctcaaagtacatttcagggaaagcaagcggttcgccgtcaaaaaacaggctgcggtgccatagcttgttccaaaggtaggaacggctgcggaaatcggaaattgtcattttcgtcaatttgactgcgctgtgaacgccctcaaacggtttacggaacataatggtatgatgcgtacctctgtcctgattatacaaagcatagttgcagcacgaaacgtcggcgccgctgtcctttgcggcgcggtacaggtttttcagaaagcttgggtctacgtaatcgtcgctgtccacaaaggctatgtactctccgcgggctttcttaacgcccatgttgcgcgcgccggaaacacccttgaccttattttttaccaggtggaaattataaaatgaagcggcaaaatcctgcgcgattaaaaggctgctgtctgtggagccgtcgtcaatcataatgacctcaaagtcgcggaacgtctggcacgctacagaggcaaggcaacggtacaaatagctgtctacattatatatagggatgataacgctgatttccggattatcgttcataagccattaagagtccttttcaatggatttttcttcaccggctccccgcatgctgtcttcacagccgctgtccggcgcgctcatttcctgtgcaagctgattgatatcgtgctttcgtttgtcctttgtaaaataggaaaacgggctggaaacgagaatcatgccataataggtgatgattctccagacaaggattgccgacttgagtgtaccgcccacaaaaaacatgccgaagaaagcggagaagccaagctccgccgcgccggaagcgccgggcaggggaatcaagctggaggcaaggttgacatacgcctgcgaacaaatcatgtcgagtggggaggcgccgtcaagctggaacgcacagtaaataaaataaggaacgcttaaaattgccaaaatttgaaggaaaacgaaaatataagaggagagcatcagctttggtaccttgaacagttctttattgccctgatggaacatatcgatttgcccctgaagcgcctgcgctttcttttctgggtttttaataaaccgaagctttttcatgacccatgagataaaccgtaccagctgtgccgagagcttttcgttaaacgatacgacaatcaggccgaaggtaacgaccagctgggataaaaacccgattaaaacaaacgcccacatgagaggcgtgttcattgtttttaaaaagtagtcgaaccgcacgacaatcgcaatcaggctgaaggccgtggaggtgagctggtatacgatgaatttctgcatcatgcaggaggtaccgaatcccgcgctgatattcatctttgacaaaaggtaaacctgcatgggctggccgcctgttgacgacggggtaatcgcgctgtaaaactggccgacaaggcagaccttaaacgcgtcccacagcgtaaaataagaaaagcggctatggataaaattaaaggtcacgagcgtatccataaatacgttaaacatctgggcaacggccgccatcaatagccatagaaagttaatggaacgggaagaacgcaacaggtccattaagccctcttccgaaaaaaagaaatacgcgacgaggcaaatggaaatgacgatgaccagtatattgataacagcgccggctcttattttatggtggcgcttttttttagaaccgtccaaatatatgcctccctgccgccttttgacggactttgtatcgtagttgagcgcacaagtatctccattatagcacctggtggggaaaaagcaagaaacaggccaaatcttcttatacccatattatcttaccaaaacagaaaaacaatacgggaagcgctgtaaataaaaggcttatccggcggggctgtagagcgcgccgataaacacgggcaggctgctttcgttgtctacaatcaaaaataaaaacgggcggtcgagcacgacgcggtgctccgtcacggcggcggaaaggtttacctccgcctttgtggcggcgcctgcctttacgccctgcggccccagctcaatatgcgttttctgtacaacgtcatttagtataaggccctgcggcgaggctttcgtaaaattggcctcatccgtaaacgcctgcttcataccgaggctttgcagcgccttattcaggctggtttcgtaatcaaaggagaacgcgggcgtgctcacctgcgcaaaatccgttgcggccacagagctgaaaagcgttgtaagctcctttttatcgagtgacgcaatataatccgcaaggctggttccctcgtttggaaggacggcggcaaaccggcacggaagggttttcaggttttttacatagccctgtgcgttctcgctgtggatatagcgctccgagccgtttaagaagcttgccgtctgtacggtgccgtctgcgaggtggaaatccccgtccgttacgttggcagattggtattcgcttgcccacaggtcctccaggtaaagggcgttgagcaggtacagcgcgccgctttcggacgtttttgaaacgatggaatcaatcagcccattcgtatggtattttgtccactcgttcatatctttggcggcttcggcgcttgaaaagtcggcgctgaatatgcccgcgtcaaaaaagtcggcgtttttctgcaggaaactgcggttaacgtcgaggccgtcgcgcagccagagggagtttgctatctgcaggctgccctcttccttgttgaaggccgtcaggcgctgacgcaggtaattgctgcacgcgttgatgttctcggctgatacgacaccgccgccgagcaggcttttcatttccttgagcgtaccgccctgcgcgccgttttgcagcatagcaagcgtaaaataggcagaaacaggggagagcagcgtgttttgcccttccttgcctgtttcccgcagcagggaagcggagaactccgccacagcctctgaaaatttttcataggactgaggcggttccgtctgtttggtaaagtcgtaatccacggcggcgcttccgcgcggaacacccgccgtcaaatcgcgcgccgaaagctgcgggccgctttcctggctggaacaaccggaaaacgcagccaataccataagcagggaaagcgctgtggcagcggccttttgtaaatgcgtttgtttcattcctgagaaacaccatccttctgtattaggtcctgcatgagcatataaacgttttcagcagaattttctttataaaacgccttgcacgcctgcttcatcgcatcgagctttccagggtgcacaagcaaatcctctatttctttggcgcatttgctgcccttcgagagcatgaccgccatattgttgcgtacaaggaagtcggcgttctcttcctcctgcccggggaacgccttgaaaatcgccatcggcagtgcggaggcgagggactccgatacggtaaggccgcccggcttcgtaataatcaggtcagccgcgctcatatatttattgacgtcgcttacaaagtagaggagctttgtcggtttggtggcgccgcttccgcggtatattttttgcaggagcgtcgtttcaagcaaatcgtcccggaattcctcggtggccgctttgattttatccttgaactgtcccgtcttttccttgaaagagccggaaagctcctgcatgagcctgctgcggatggattcatggtacgcgtaatcggagtccggctcttccgtgccctcccctttttcggcgtttgcgatgatttcccccgcgcttgcgctcgaagagcttaaaagctcttcaaacgcgtcgtatagcttctgattttttccggtgataacaatcacctgaaaatcgactttaatttcagaaatgctctggtatatttttaatatatcggtcacgccgaagctgccggccatgatgagcaccgtcttgagctttgggtcaagctgcatctgcacaagcagggcctcgcggtcataacgctcgtaaaacgcagtgtcgattggtatgccgagcgcgtgtattttattgcgcggcaccccgtaggcctccacggcgtccaccatttccgcgctcgatacgacgtacgcgtctattttttcattaatataggttttgtgcggcgcaaagtctgttataatacagacgacctcaaccgggacgcggtagtcccgcttaaggttcgaagccatctccgccgcaaacggatgcgccgtcacaatgacgtcagggcggaattccagaatcagcgggataagctttttggtcatctgccctgttatttttgttaccagcgagttcagggtcgtgtcacggttagcggtattatatacgctgccgtagagcttgggcagctttttggcgaggaacacgtatccgtcggataccgttttattgagcgtgtggctgacatattcgagcgcatcgatgacctgtacgacggctgttttatcgtgtgtggctatgtagcttttcagcgcgtttgacgcgcgcatatgcccgccgcccgtcgaagcggaaaaaatcagaactcgcatgagcttcaccctttataaaaatttcattatgtttttttaaactttaatatcgtctttataccgttatattatattatatcaaaaaaatcttcgatttcaacatagaaaaagcttacggatttgtcacatacaacttattggagcagcggctcccggcagctacagcagcttgcggcaaaccaaaaaataacgggaacagaaaaccaactttgttaaattttacaccgcgccttatatagataaatctttacaattgcggggcttgtggtgtatgatatgtacaagtatcgctataggcgttttgtatctcaaaccgaaaggagaaggtattgtgagcgatgataaaagagagaaggatataaacaagctggagcaggaagctccgcagaatatagagccgaaagagcaggatgtcgaggcgcttttgaacgaaattaggcagcagcagaacttcacgcccaaggcgccgcaggcgcaggctatggaggaagcgcccgccccggtgcagcagccgtctgaggagcagccaaagcgggaacaggccgaggctgttgaaacacagcgcccggctttcggccagtttgaggatatcagcagctcgagcggggaacagaagcaggaaaatgtatttgttcccgcgcttaagccggcggaaaagaaaccgaagcagaagaaaaaatcgcgtgggaagtatgtcgttatgggcgtgctcggccttgtgattctgcttgccgcttcgtttttctgcacgctgtttttaaatcccgaggttatcccaagcattgcgccggtcactgaggtaaagggagcatcgccggagccgaaagaagcggtctttgcaaagggcgtacaggtcggcggaatcgacgtttcgggcaaaacgctgaagcaggcgacggcgcttatcatcgtcaaggaaaaagacgcggcgccggaattttcgctcgacgtggtaaacggggatatggcccttacctacacgcaggatgatttcagctacacctataatacaaaggaagtcattgcgcaggcttaccagtatagcaaggatgtcgcaaaagcgctttctgacggcagcattgaccgtctttcaaatccccagggggataatgtgaccgtcgacgataaaaacgggacgattaactttaacatttcctgtacggttacgaatgattctatcgagaaggtcgtggggagagcagccaaaaaaatggacgttccggctgtagagccgcatgtatcgaaatttaacccgtccgcttcctatgcgaagatgtttaccttcacggaaggggaagacggcgtatcggttgacagggaaaaactgtatagcgatatctcggcgcagttttcgggcggcgtgaagagcggcagcgttaccgtacagacggaagcggcaaagccgaagcacacattggacgaggttaaaaaggcgacaaagcttattggtaaattcagcacggtttccaccaacacatataacgcgaaccataatatggataccgcgctcaaggcaatcaacggtaaaatcgttgagcccggcaaaaatttttccttcaacgaatgcacgggcgacagcaacctggcctcgaacggctacctgcccgcgagcgtaattgaaaacggcagctaccagcagggctacggcggcggaatctgccaggcggcgaccactatatataacgccggtatccaggcgaatatggggattacagagcgttacccgcatttgtggtgctcgccctatgtctacggcggacttgacgcgacgatagattacggcaacctcgatttaaagctgcagaataatacgcagttccagatgttctttaaaacatatatggacggtacgacgctctactgcgaaatttatggctggcaggacccggacttcgatgaggtaaggaccgaatcccacaatacatggaccggcgacgaggagtacggctttgccgcgcagcgcgtttactataaaggcggcaaagaggttggaagggatgatttgcccgattccacctacagcctttcaaacggccactatgtcgtggcgggcgatcccggaaacacctcaaggaagctcaagcagccgggagcagccaaggaaaaatcggacgagaagcagagcgcttcctccactaagccggtttccacaagctcgacacaacagcaggttaatccgcccgcgtcccaggcgccgtccagcagcaagccggacaacccttcctcaaggccggactccagctcgcaaaaaccggacgagccctcacaggctcccagctcaaagccggaaagcgggacgtctggagggagcgctgcggatgacgaataaaatttttaatgaatttaaaatttcagcgcgcacggaaaatactccgtgtgcgtttttgtattttgcgcgtgtttgccgccatactaatgaaaaggataaaccgcagaaaaagataaacggtttgtaataagaaagggatggttccattatggcaacgcgcaagggaagctatacgcttgtgctggacaacaggcctgcaatagtgggctgggctgccgtcgcgggcaaaaaagaagccgaaggcccgttaaaggacagctttgataaaattttttacgatacgatggcgggacaggatacctgggaaaaggccgaaagccagctgcaaaaagaggcggtgagccttgcgctcggcaaggcaaacgtaaaggcggagcaggtcaatatgatttttgcgggtgaccttttaaaccagtgtatttcatcctgctttggtctgagaagcttcgatatcccgtttcttgggcagtatggagcgtgctctacaatggcgcagacgcttctgctcagctcattatttgttgatacaggctgcgccgattacgcggcagcggttacatcgagccatttttgttccgctgagcggcagttccgttttccgcttgagtacggcgggcagcgtacgccgaccgcccagtggacggtgaccgcctcgggctgcgcgctcgttggcagtaagggggaagggccgagggtggaagccgtgacgattggtaaaattgtcgatttaggcataacggacgcgaacaacatgggtgcggcgatggcgcctgccgcggcggaggtcatcaaaaactacctgactgacacagaccacaagccgagcgactttgacctgattatcaccggcgacctcggggaagtcggttccaagctgctctgtgagctgctgctcaaggacaacctcgatattaagagcaggcacagcgactgcggattgcttatctatgacaggcaggcgcaggacgtacacgcgggcggctccggctgcggctgcagcgccagcgtattatgttcatatgtgctcaacaacatgcagaaaaaaaacgcgcacgacgtattgttcgtcgccacgggcgcattgatgtcgcccacctcctcgcagcagggggaaagcatccccggtattgcccacctggttcatatttcggcataaaagcaggaaagaaatttgtggaaaaacgataagcatcttccggaaaaggaacaatttttttctgttaatcggttcgaaagtatgctataatactctttagactttatgattaaggagtatgtatatgcttaagcgtgtacaatatatagacgatatcgtcctggacaagattgtaaagctccacacgccgcgccgcaacaaggtgatgaccttcatcacacgcatggggaatatgggcattgtctggtttgccatgtgtatgccgttccttatttaccggccgtggcgcagcataggggtaaacttcctggttgggcttgtcatcgcgcatttggcgggggaaatctgcatcaagcatattgtgtgcaggatgcggccgtgccataagctggaggacgacgagctgattgtgaaacgcccgcgctattattcgttcccgtcagggcacacgaccgcgtcgttttccgtcgtggcggttgcgtggatgcgctgctggcctgtggctatcccggtgacgatattggcatttttaattggattttcccgtgtgtacctgcgtgtgcattacctgaccgacgttgtagcgggcgcggtgcttgggctgttctgcggatttttatcggtcgagcttttacgtgcaatgttctaaaaataaacgaaggggggcagccgccctcctttttaatacataaatctgtatgcaaaaccggtatccgcttgattttcggataccgctcttttatgttttccagtaaaggtacagcctgcacgttagaggatatgctcataagagcatgatgagctgcccttatataatgcaaaaggccgcccaattgatgggcggcctctttcttgctcggtagattttttatttcagccaagcgacgtccgtgtcgttgcaaaggttatcgagcccgtagagcacgagcatttccgtaatgccttctttttcaatcagctctgacacgggaagcttgtaatagcgcaaatcaaccatgatgatttcgctgtaatgctccgaaaggaacggcgcgatgctgtggccgaacgaatccttaagcagaaggagcttgccgccgtccgccgctttgttttcaatacgcaccaggctgtggttgccgtcgaggaaaaccgggtacttgtcgtcctcgtcgagatggctcaggaagaaaaagctgtcgttttccttttttttatccccctcttcgatggtaacatggacattgtcctgattctcataatccttatcgtaccagagctcaatttcatccggcggcgtaagccacagggcgctggtggaataagtggttccgtagaagccggggtgctttttaatgtcgaaacgttcctccggcactgcgtcaagtccctttcgcgcacagtatgcctggtaagcggtatatgcgccgcgcgtcgtccaatggtggtccgtgcggtaataaagctgcgtattggcggcgttttcctggaacaggctttttatgttgataaaatccatgccgcctttatttttttcaatcagttcaaaatacgcgtcgtcaagataggaaagatggttatccggcagtttatcgtccatgatatagcctgtgctgggcgcgatgagcagcgtagtatccgtgcccattttctctgcgaacatcgcaaaggtactaaggtttgcttccaggtagtttttacggtcggcgggcttattgataaggtagttgtccttacccaaatatacgccgtttgagccgttcctgccggatatcaggtcgtagtaggcgttcagcccgacaaagaagtcgcgtcccgccgtctggtcggaaatataggtttcgtattccttgccgaactgcccgctgaaaaacgtgtcggtattaagctttgggaaggtggtcaggtaccgtttttcgtttgaagaatacgccctgtccggtgaaaagaggaacagcaggcacattacgccaataaacgcgcagaatacgacagccggcaggtgtttttttaaattccttaaattcataggttcaccccacaaggtaacgttgcccgttttcctttagaaacggaaataaataaacgggttgtagctttggctgacgagcgccgcggtgcaaatgagcagggcgatcgagcatagcgccgtttcgggaatccagctccaattgcggtattttatcttatcgtaaattctataggcaagcggcgtactcgcaattaccgcggcaatcagcagcggcaggtacgaccatacggccgcaagcgcgtccgccccgataaggccgccggcggggttgaacaaatccccgaaaaaccgccccatctggccaaggtcttcaaaataaaagataacccagccgattatgataaagaaaagggaatagatatgctggacgacggatggcagcttatccaaaaaccttttgagcacaagcttttcaataattaggataatgccgaaatatagcccccacataatgaaattcacattcgcgccatgccacaggccggtgaggaaccatacaatcagcaggttcaaaaccatgcgcggcttgcccttgcggttgccgccaagcgggatatacacatactcgcggaaccaggtgctcaatgagatatgccaccgccgccagaactctgtaatgcttttggaaatatacgggtaatcgaagttcttcaggaattcaaagcccagcatgttgccaagcccgcgtgccatatcggaatagccgctgaaatcgaaatatatctggaacgaataggccgcaatgccgatccagctgcccaggataccgtttgtcgggcttgtttcccgcagcgtgtcccaaagcaggcccatctggtttgcgattaaaatcttttttgccaggcccaccataaacagcttgacgccgtttgtaaaatctgaaagcgtttcgcgcctgtgctcaagctggtaggctacgtccttgtaccggacgataggcccggcaatcagctgcgggaacagggcgacatatgtgccgaaattaatgatgttcttagttacaggcgcgtcgccgcggtacacgtctatggaataggacatcgtctggaacgtatagaacgaaataccaatcggcagcgggacggtcaggattggtatgttcaaaaacggcaggtaattgagcgtttccgtcaagaagcccgcgtatttgaaaaagcccagcagcgacaggtttatgaccacgcacgaaaccaaaaatattttggcggccttttggttgccttgacgcttgaacttgtcgataaaataaccgtgcgtaaaatcgaccacggtggaaaacagcatcaatacgacgaataccggctcgccccagccgtaaaaaaccagattgaccgcgaatagaaagatattacggaatttacgcggaatcaggtaatagacgagcagtactgccgggagatataaaaatagaaacagaaggcttgaaaataccatgtttctcctccttgtcttaatacgtcgttctgcctcttgcagaaagaagaagcccgcggttttccgcataaagacagcctacctgccgcgcagcctttacctatgctgatgtgcaggtaagccctctttaggcggaatcctttccgcggttattgttattttttctatgggtcgaagcaatcgttgtagatgccggaaagacgccgcgcgtccgcggaaaaaatcaggcggatataacggccgttcgaaacgacccggctctcccggtaaaaggcatactgcgctggggattcctggcgcagttttttgagctttatgtccagccgcttttgcagcgccatacggattttggcaagagaagccttgtcctttgcttcaaataacagtatttctgtgttttcgccgtccccggcaaagctttttgtttggtattgcaccgtatcagccgcatcgattccataaaagttccataaatcgagcggggtcgcggcacaaactggaacgcccttacaatcgcagtacagggaaagccgggtcataacggatgtaaggcttagccgcccttcctttggaggggacggcgcgcaggaagaaaggaacagaacaaataagggaagcatcagaatagcaatcgtctttttcacaggaccacccaaacattgcagattgcatggcgcgggagtcccccgcgcctgcttatgccgtttgcattcctgcggccccctgagcagccgtgttttttacgtccttaatccttctaatgcggtgaaacgcccgggcaggcaatcataagacctgcgccggacgtgccgaccttataaacgcggaagcctgcgccgcctggcgggaggcgcttgcctccttctgcctgccgcgcccgctgcagctgacaaacagcacacagaacaaaagcagcagcacagccgcgaccatagcccttcgccctctgaccatttggccctcctatcggggatgaagtccccctgtgggttcagttgaagtaagaattatagacgtccttcatgccgtctgcgtcttttgcgataatcatcctgacataattgccgtttacagcaacctcgcacgtttttatgatagcgtagttttcagggctgtagcttgcgatttcgttcgattttgaggtgaggcgctcttttaatttcgtttccacgcgtgccgcggcttctgcatccgccgccttaatcagaacgatttcatttaggccgtttttctcgatttccgccgcaaaagccgatacgtcggcgctttccaggcggtaggaggtacacagctcatccttatctgtaatttcctgcataccggaaattttataatccgtgtttatttttgccataacctcgtttaagtccacgtcttttacggaattgtccgagcagcccgcgaacgcgagcacgcagagcgcggccaggaccgttgcaattatctttttcattttcccatacctccaaaaaattcactttttaagcaacgattccattttaaacggtgttgtttgtgatgtcaacagcaattacccgaatcaacctttacaatactgttacggttgtctcttacttttttacatgtgcctcttccgcgtggacaagctcgaatttattctgcgggtagaactcttttgtctccgctacacggtaaacctcgctctggtgcttttgtaaaagcctggtaatcgcgtagaggtcaatccagatttcattgacgcattccttttggctttcgtcaaaaatcagctgcaggccaaaatgcaggtggcttgtttcaataccgtttacattttctttcgcgctgtagcccgttctgccgacatacccaatcacgtcgcccgcgtttaccgtcttgccttcgcttaaatcggcatgataggggcggttctggcgcaggtgcgcatagtaatagtagcgtttgccgtcaaagctgcggatacccacgcgccagccgccgtactggttccagcccataatttccacaacgcccgattccaccgcgataacgggcgtacccgtcgcggccattaaatcgtggcccaaatgctggcgcttatagccgtagtcccggcttgtgccgaaatcgtcaaaatgggaaaagggaaacgttttggcaatgggggaaaaaacgcacaggccgtatttttcttctgtcgtggtgttgcccgccccgtctgttttttgttccctgtagtttcccagaaaaccgctgagcaccgcgccgtaggcctcgcggtaataggggaaatacttcatatcctttgtgaggtcttcgactttttccccgcttttcagcttttcaataaactccgtacagtcctttttcttatagctcttaaaattgccgccgtatttcgcgccgaggtaagaaagcacgtcaatccagtctattttgatttcctgcccctgcgactcgatatcggcgttcatcgccgtttccatcgcgtcgtaacagacgttgtactccacatatttaatataatcttcattttttccgctggcgcccaccattactgcgagccccgtgcccagcagtaccacggcgagggccgcgcaaattaccttcttcacccaaatcacccgcccaaacaacaaattgtctttcctatatatatgtgcgttccttcactggaattcctgagaagcttaccggtttacaaatttgcgcgaaacgctataatataagatagattcaattaggaaacggtgggggaaagatgggaaagaagctgccgcacacgatggtactcgttgccgccgcgcttattgcatgcgcttttatttcgggctacaacgcgttttatgtaccgcagacgaacctgccccgcgtaatttatactgaaaaagggacggggccatccgtaccgccgcacgccgcgccgtccggtgccgaacaggagcctacccgggcgcaagcgcttttaaaggtaaacataaataccgccggagcccaggagctgcaggaaaggctcgacggcgttggagaggtcatcgccgcgagaatcgtctcttacagggaagaatacgggcctttcggcagtattgaggaaatcaggaatgtcaagggaatcggggaagcgacctttgaaaacataaaaaacgatattaccgtttaaacgggttgcataggagaagataacaatggcaaaatcacagaacgacctggggcgcgggagcgtcggcaggctgctgtttaatatggcgctgcccgcaatagcggcacagctgattaatgtgctgtataacctggtggaccggatgtatatcggccatattgaaggaatcggcgacctggcgcttacgggcgttggggttacgtttccggtcattatgataatttccgccttcagtatgctcgtcgggatggggggcgctccgcgcgcttcgatgaaaatgggcgcaaaggattttgacggcgcaaggcgcattctcggcaactgcgcctgcctgctggtcattatgtcggttgtcattacggctgttatcctggcgtttgggcgcgatttcctccttctgttcggcgcgagcggcaacacaatcggctacgcgatggattacctggcgatttacgcggccggtacaatttttgtacagcttgttttggggctcaacccatttatttcagcccagggctttgcaaagaccagtatgctcacaaccgttatcggagcggttttaaatattgcgctcgaccccgtttttatttttgtcttcggcatgggagttaagggcgcggcgctcgcgacgattttatcacaggcggtgtcggcggtgtgggtacttaaattcctgaccggaaagcgcacgcagctgaaaatccggatgaaatatttccgtttgagcccgtcggtcatcctgccggtggtggcgctcggggtttcgccgtttatcatgcaggcgacggagagcatcatcacggtctgctttaatgtccagctgatgcgctacggcggagatttggctgtcggcgcgatgacgatattatcgagcgtcatgcagtttacgtttttgctgctgatggggctgacgcagggctcccagccgattatcagctataattacggcgcgggcaacgtggagcgggttaaaaagacgttccgcctgctgtttatctggtgcatggcattcgcggcgctcctgtggggcagcattatgctttttccacaggcgtttgttgcaattttcagcaacagcgagcaattaagcgcaatttccgtctgggcgcttcgcatctacatgggcgcggccgttgtactcggtgcgcagaacgcctgccagcagacatttatcgcgctcggccaggcgggcgtttcggtgttccttgctatactgcgcaaggtgatattgcttatcccgcttatctttacgcttccgctgttgctggacgacaaggtgttcgccgtctttttcgcggagcctgtggcggacatccttgcggcgacagcaacggtgattttgtttgcgtaccggtttaagcggattttaaagaaaaagcaggaggaggtgatacctgtaggggagcagcaggcgcccgtacaggcggaaccatagaaaagaggtatttcatggaaaagcttacagatatgccgaacatcggcaaaaccatggaagggcagctgaaccgggcgggaatcaaaacgccggaacagctcatagaaacggggagcaaaaaggcgtggcttttgattcaggcgttcgacccatccgcctgctataacaggctgtgcgggcttgagggggctgtgcgcggggttcgctggcacgatttgcccgacggcgtgaaagctaatctaaaagaattttacagagagcataaaatatgagaaacgtcccttcccggagctttgggaagggacgtttcagcgttaccagcatttgattttatctgtcatagaaaaatctgaaagggaataggccgttaggtacggcgcgtttgcaatatagaaatagtcgccgatatacatccccctggccctatccaggtaaaggctttcagcgtccgggctgtcaagcgttatccgcgcttccagtgcgaagccctttttgccgctgtaggaaaaaacagaataacacagggttcgctcatagctgctttcatttaattcccaaacaggcagcccaaccaaccctttttccgggtcaatcaggattgctttaaattcattgagcgctgcgctgctcccatttctgtccgagaacgtgatggagtgcgtttctttgacgctgctgctgtcggttgtgtcaaacatagagagcttgagccccgtttgcacgccggtttcatccgcgtcaattccaaagcccagcagcttgttttccccaaagggatgcaaataccgtgaaaagccgggcagcttgagctcgcttttcagttccgggtgggcggggtcagaaaggtcgaccgcaaacagcgggtcggtctggcggaacgtcacaaaataggcggtgttttcaacaaaccgcacggattgaagccgttcatcctttgaaacatttgaatatgtccccacaatgcgcaggttttcatcaaggacataaagcgtttgggtttcccccagtatttcggcggagactgagccgccttcccgcgttaccttcctgtccgtatcagaggtgacaaggcggaaataccccccgtactcatccatggagtattggtttaaaagcccgcccttcagctcggtttcggcgtcgagcgaaattttgccgccggataagccgtattttaaaagctgaaggccggatgtttccgtttcctcatgatattggcagatgggcaggtacaggctctgggtactgcaatagacagccgttccaccgcccattacggcctttgcgtcggtaaaatcggatggcttttttaaattgatagacgcgatggtggtatactgcgcctgcggcttcgccatcgatatacacacgtccgcgctggcaaccgcacgcctttttccgctggcggtaagcgatgggacaaacgatgtggggaattgctcctgtgcgtcgtaaaattggaaaaagtaatccgtcaatacgtacagcgagccgtccacgacgcgcgaggtaaggtaattgccgcttacttccaaattgccgcattgctttggtgcgctccggtccgagatgtcataaataaaaacttgtgtgtccccggagcgcgccgcttctccgcagacggcggtatcttcatatatacccgtgccgtacatgtcggagcagaggacggcaagaatattgtcctgcaaatacaattggactgcctgtgtgctttgtatattattgtccttgcccgtgccgtttccgatgacctctgtgtatatgtgtgtgagcctgccgttatccgcctttgcgattgtcaggcggttttgcacgatggtataaatatacctgccgtccgttttggaaatatcgccctcctgcacgccctctgcctgcatattggttgaggaataagcctttaacgcgctgtcacccgcggggctgtattccggtgccagggttgtttcgctcccgccgccgtcctgctttttcgcttcattttcccggtgcgcccaaagcagcgtgtgatagatggttgtgtaatcgttctgctgttccttagcctcctgtacgggtgggagtaggctgcccgggttcatatcggagggtattacggatgccgccagcgtcaggacgagcacgagcgcgcatactactgcggcccctgctgcaggacgctttttccgcacccccctgagggcttgctcaacagcgccggggcgcaggcgttcaggcggaatcagctctccgcccagttcctccagttttgagaaaagctccctatcttccatcagggtttcctcctttctttcatataccttttcatattaaaacagtttatttttcttccaaagccgctttcagctttttcagggcacgcgcgtattttgagcgcacggtgttgcggttgagcttacatattttcgcggtttcttcactggtgtaaccgccgaataccgtgagggcgacaatcatacgttcctcatcgctgagaacgcgcagggcttctttcagctcggcgcgggcggcaggcggcaaaaaggaatcagcgggcggcgggctgtttaaaaggcctccatcgcggtaatatgaccgcagctgcttcttgcatttgcgggataaaatcgtaaacatccagcttttaaaggcgtcttccccgcgcagccttccaatggtcgcgtatgcatccgcgaccgcctcgctcacggcgtcctccgcgtcctgggaattccgcaggacgaagcaggcgtaacggtataaatcagcgtaaatttcctggtacagaagggagaaggcgtgccggtcccctttgcgcgcgcgtttcactaagctgttgaaggaatcagtcaaagcccttgcctcccctcccgcaaatttgctgtaaagcatccgctataagataagtgtaaacaaggcgcgcttttgttgcaaggaatctgataaatttataagaacaggaaatttatggggttaaaagcgcaacattttgtaataatttacaaatagaaacaaaggtttatgaaaaaacatagttaaaaatatcggaatcgcttgcatcacagcggaaaaaatggtattctcagattataaaaacattggactggaaaggataatggatgatgaaaaaaagtaaaggcatattgtcctgcgcgctgtgcgtgctgctgcttatatccgtctttgcggcagtccccataacggcaagcgccgggaccggcgcaatcttctttgacagcaataccggttttacgtatgaaatgctcgacgaggattataaaacctgcacggtaaagaaatacgacggcagggatatggacatggccatcccggaaaagctcggcggcgcggctgtcgtgcagattgaaggctttgcgttcaatcagatggcgctgacctccgtttcgattcccgagggtgttttaagcatcggggacgcggccttcaatacctgtacgcagctgacagaggtgactgttcccgacagtgtcgggcatatcggcatggtcgcgtttgccaactgcaccaagctaaagaaaattacgttcggttcgggcgtgaaaagcacaggttcccaggtgctcatcaactgccccgcgctcgaagaggcggtgttcccgcagggctacgcctatattggcagtaagttcatgacgggctgcacctcgctcaggcgccttgtgattcccgacagtgtgacgaatgtgggggcaatgtcgtttatcgactgcaaaaaattggaagtggtttccctgggcagcggcgtcagctcgctcgacgcgttcagctttcagggcaatacctcgcttaaaagcataacgcttggcagcggcatcaagtccatcccgacagacgcgttttccggctgtacgtccctttcggagcttacactttcagagggccttgaaagcatcggcctgcgcgcgttcaagggctgttcctcccttgccggtacgctcgctattccaaacagcgtaaagacagtgtccgattatgctttcatggacgccaatatagaggagctgcatatcggcgccggcatatcttcgctttcctattcgttcttccagatgccgaacctcaagacggtcgttctgcccgagaaggatattgcgctggggtacgttgcgttcggcagctgcaagagccttgaaaagctgtatatcccgaaggaaatcacgcaaatcgacaaggatatggcgagtggattcgcaaacctttccgtttatggttataacggttcggccgcccaggcttacgcggacagcagggacaacgtgacgttcctctcccttgacggcgcggacaaaacggcgcttaatcaggccatagccagcgcggaaactgtaatcaagggcgggcttgactcgtatacgcaggagagcgccgaccgtttcttaaaggcatattacgacgcaaaggctgtaagcgcggacatttttgcgctcaaggcgcagattgacgcggcacaggcagagctctcaaagcagcaggcggcgctcgacccgggcgttgtcccgaaatgcacgggtgacttgaacggcgacggggacgtcagcgtgcgcgacgtagtcatcctgcaaaagtaccttgcaagccaggtcctgcttaaccccgcgcagcttgcggcggcggatgcggaccataacggaaaagtcaatttaagcgacgttttgcagatgcagaagtatattgtcaaactgattccctcgcttgactgataaaacacggcagaataatagcgcacggcatatgccgtgcgcttctttttttctgttctgtttttaatcctcgcaaagcgccgcctttacggcaaaaacctttttggaaagctccaggtacgcctgcggggtaagctgctgcgccgcgtcggacatcgccttctttgggttgggatgtacctcgataatcagcccgtccgcgccggcggcaacggccgcgagagatagggacgagatatacgcgcgtttgcccgccgcgtgcgatgggtcgataatcaccggcaggcagctgcgctctttgacgacgggaaccgccgagatgtcaagcgtgttgcgcgtcgcagtctcgaacgtgcggataccgcgctcacaaaggacgacgttatagttgccctcgctcatgatatactccgccgcgtcgagccattcctctatcgtagaggcaatgccgcgtttgagcaggacgggtacgccgctttttcccaccgcgcggagcaagcggaaattctgcatattgcgcgcgcctatctggaacatatcgcagtacttggcggcaagctcaagctggttttcgctgatgacttcgctgacgacgcgcaggcctgtttcatccgcggccttgcgcagcagcctgaagccctggtcctcaagcccctggaacgcatacggcgaggtgcgcggcttatacgcgccgccccgcaaaaactgcgcgccggccttttttacaccgattgccgcctgcataacctgctcctcgctttcaactgcgcacgggcccgccatcatcgcaagctccttgccgcctatcaaaaagccctttacatcgacggtgcgcccttcggggcagatgtcgcggcttgcaagcttatagctgtgcatgataggcacacagttttccacgccgtccatcgattcgatgcaggtgtcgcaaaggaccgacttgtcgccgatgacgccgatgatggttgcgtccgcacccgttgaaagatggatgccgagcccgtgctccctgagcaccttttctacgttttctatatcgttctgcgtagcagtccgtttcattacaataatcatggagttttcctcgcttttctttgtgtttatcagaaaggcaggcatacccgcctgcctcaagggttatatgctgtccggtgagccgttatgagcgtcctttttatcgatatacctgcgcgccgcgtggagcacgcgcaggtcgttttcgtagctgcacattttttccgcctgcgggaaggtcgcccagacaaagctgtctatctcgtcctgctgtatgtcaacctggtctgttttggtttctgccaggaaaaaaatcacgcgctttttaatttttccgaatgggcagtaatcgctgatttgccggtaatggtcatagatttttacatcaagccccgtttcttccttgatttcacgcagggccgtctgtttttcagactctcccttttctacatgccccttcgggaagctccagtatttgccgttatggtttttgacgagcaggaccttgtttccatcgggagagcggtaaaaaataaccgcgccgcaggatttttcgtaaaggcacgaaagctgggagatatcgagcccgcgtacgctgcgcaggcgttcgcgtatttgcggttcgtaaaaaatatccccttccggcgcaacgatgatttttggttccgcgccgcccttctggggagaaagcgcgatgattacgccagcaaactggtcccgcagcggcctgcgcgatataatatatacggatttcccgtgaaaggcttctccgcaaagatagcccgtatacactccccttcgggagatagaaccgtaaaccgctacctcggtgtgtgtacccagcatggcatcatctcctttcgcccggcttcgccctctaagcgttactggaacagcttgttcatgttctctatctgtaaagcgctgtttgcggacataacgccgtttaggaacagcacggttttaatcttgttcttttcacaatattccttgagattccctttgaaatatcggaaatctataacatgtacctcatcgtaattgttagacaggaacggagcgaaggcgtttccgtacatatcctttacaagcgcgattttatcgccgttcgtaatgccctggttatcgattaccatattggcgttgtctccgtataaaaagacgttataaaaatcctcgccgcttgatacttctttatacaggccgaccgtctccggcgtttcggaggtgtttccgtcctcgtcggtacggtaaagcgtacaggtgaggtccgcgggcattgtgtagtagtcaatggtgtcgaggttgccgcttaattgctcattccaggtagacgtaacatagcttcccgcgaaatcgcttatcgtgttcttgtccatttccccaagcgcggtaggttcaaagcccgcagtttttgcaaattgctcataggcatagtatgcgcccaggctagtccagcggtaatcggtatggaagaagatatattcgttacgcttttggccgagcgcgttataaatgtccacgggagttacagctgcggaataattgctgtagataacggtcgtgttgtcgcgttgcggatttgagccaatgacggtggacaaacgctgcggcaggccgaactccgtatggttcgggattaccatattatacaccttgataccgtcgccgagggcctttttataggaagaaacggcgtccgaatagctcagggccgttttttcgtttcccttgaaaatatcgaagccctgcttgttccaaacataaatgctgccgtccattgcgccctctgagccgtcgtccgcaagctccgggaggtttaccttctctggtgtgtaggatgaggaaaccggcgcgctggctgcgtttgtcggctcagtcggtgttttagacgccgcgtccttttccgcgttcatacccctgccgattagcataatggcaaaaaccgccgctacaatcaggagcaaaaccacaataacgccgagcacacggttgcgcctttttttgtgggcaagctccttctgcctgtaatattcctcacgttcggttttcgtatgcctgcctgagggtcggtaaacatttgtattttgaggggccgcctgcttttttttcctgtccttctttttgtttttctgcggatcgtccggggctttataaaccgccatagcgaaactctcctttataatcccgcagcaaaggcagaggggatgggcgccgcggcaaaacttaattctaatacgtcaataataaagtataatataaaacgcggataattacaatacaggaagcctccaaataacagaatttctttaaaattattgcctttttcgcctgcgggctgcggaaaatacggcctttggttgataaatccaaacgagtgtgttaaaatttagtttaatgcagcacggcggatttaaccgccgtttatcttgacgaaagaaggaaattgccacatgatggaatacacattctccgacagggtcaactcgctcaagccctcggcaatcagggaaatttttaaatatgcggcggacccggaggttatctcgctttccgcggggaacccttcgcccgacgcgttccccgtaaaggaaattgcggaaatttcaaacaggattttgacggaaaatccgattgccgcgctccaatacagcattacggagggctacgcgccgctgcggcagcagctttgtgcatacatgaaatcaaagtatggaatcgggcgcgatttcgacgacctgattatcacgaccggcgcgcagcagataatggatttggcgggaaaatcccttttaaacgagggcgacaccgtcatctgcgaggcgcccagctttattggttcgcttaatacgttccgctcgtataacgcaaggctcgtaggggttccggtcgagagcgacggcatggatatccagaagcttgaggaagcgctcaagacggaaaaaaatgtccgttttatttataccattcccaatttccagaacccgtccggcgtgacgatgagccttgaaaagagaaaggctgtttacgcgcttgctaaaaagtacggcgtcctgattatcgaggataacccgtacggcgacctctattatggcgaaaagccagcgcaggctattaaatcgatggacgaggagggcgtcgtcatccattccggctccttctccaagacgatatcccccggcatgcgcgtcggctggtgcgtcgccccgaagccggtcatctctaagtttacggtatgcaagcaggggcaggatgtgcataccaatatttggtcgcagatggtttgcgacgagtatatgagaaaatatgattttgaggagcatctttcgcgcctgcgttccctgtacagcaaaaaggcggcgctgatgatggagctgctcgacaaatatctgatgcccagggtcacatacaataagatagaaggcgggctgtttacctactgtactttgcctggcggcgtcgatatggtcgatttctgcaagcaggctgttttacggaaggtctgcgtcgtgccgggcaattcgttcctgaccgacgaaaatgagccgtgccaaaacttccgcgtcaactttacgacgccgacggatgaacagcttgtccggggcgtgcagattttggggcagcttgcggatgaagtgataaagtaaccggggagccggtcaacatatctggggaggttctatttatgaatcagcagacagcggtgcctgaaaagaaaaaaattatattcagcgctatacagccgagcggcaccataacactcgggaattaccttggcgccattaaaaattgggttgccatgcaggaggaatttaactgcgtttacgcgcttgccgacctgcatacgataacagtccggcaggacccgcagaagttccgggcgaatacgctcgaggcatacgcgctgctgcttgcctgcggcatcgacccggagaaaagcattttctttatccagagccacgtgcatacgcacgcggagctggcgtgggttctcaattgctacacgcagtttggggagctttccagaatgacgcagttcaaggataaatcggcaaagcacgccgacaacgtgaacgtcgggctgtttgcctatcccagcctgatggcggcggatatcctgctgtaccaggcggatatggtgccggtcggcgcggaccagaagcagcatcttgagctgtccagggacattgcggcccgcttcaatggcctttatggcaatacgttcaaggtgcctgagccatatatcccaaaggtcggcgcacgcgttatgtccttacaggagccgcagaagaaaatgagcaaatcagacgagaacgtaaacgcatgggttgccgtgctcgacaagcccgagacgattatgaagaaattcaagcgcgcagtaaccgattccgacatgcgtgtctgttatggagagggtaaggacggcgtaaacaacctgatgggtatttacagcgccgtgacgggcaaaacgaatgagcaaaccgaagccgaattcgacggaaagggctatggcgatttcaaggtcgcggttgccgaggcggtaatcgagagcctgcgcccggtgcaggaaaaatatcataagctgattgacgacaaggcttatttaaaggaatgctacgggaaatcagcggaaaaagcgctgcgtttttcacagcgtacgctcgataaggcgatgaaaaaaatcgggtttgtcatgaagtaaggccttcctgtatttaccagggaaaaccacccgttttcatcggttttttacaattttcacgccgcccctctattgaaaaggggaccggtgtgtattatactgaaaggcagatatgagtgaggacaaggaggaccatgccatgccagaagaccatacggagtccaattacatcaggagacaggaatatttgaggaagcagcgtttaaagcgccgccgccgcaacaggatgattatcgtagggaccggcatcgtaatcctggttatcctgattttaattattgtcggccttgtccggggctgttctgccggttccggagagaaggaaccgacgcagccgccgacagatgcgacgacagccgctgtcaacgcaaagccgacggagcctgtaacccagccgaatgtgaaggaaatcaaggacaacggcgaagacggccgcatgtcggacggctccattttcatctgggacaacaaaggctttgagctgttctttggcggcgacgacagcgcgaaggaatacgccgataaaatcaacgattacaaaaagcagcttggcagcggtattaccgtttacgatatggtcgtcccaaaccatacggagttcggcctgccggcacgcttgagcgaaaagctccagaaagacgggagcacgcgttcccagcgccagaacacctcggcaatttacaagggcctttccaaggatatcaaggcggtagatatttacgacgtattaaaccagcataagacggaatacatttacttcaacaccgaccatcactggtcggggctcggttcgtattacgcatacacgaagtttgcggaggtcgcggggcttaagccgtttgcccttgaggatgcggaaaagcattccgtcgacggatttttgggctcgctctataccatatccaacgacagcgcactgggcgacaaccctgaccgcgtcgattattatgtgttccctggggattatacctgcatgattacgcaggacggctccagcgagccgatggaggccgacatctactacccgaacgcaaccgccggaaacaatacctatggcgtgttcctctggggagacaacccgctgaccgtcatcaagaacaacgacggcggttccggcaggaagattgcattgattaaggaatcctacggcaacgcgttcgcgccgtaccttgcgtataattacgatgaggtgcatgttatcgatttccgttattacagcggcagcctgaagcagtattgcagcgataacgggattaccgaggtgctcttcctaaacggggtcatgtccgcgaataccccgctccagctcgataatatggacggcttgttccagtaaatttagttgatttgcagctcccgcagactttctgcgggggcttttatatttggatagatttgaaaagctttaatagaactaatataaaaggaggggcgaagcaattgtgacaatatgcgtatggatggattagaaaggcatttgaaaagcccgcaggctggggagacaacatttttatatacgtcttttcaaacgacggcagctatacgtcgtttgatgatacaaaagtaataggtagctttacagcgtaaaagtaaataaccagccagacggcaggcgccaaaccgggtgcctgccgttttttatggttttcagtcggcatagggctttgctttgtgagaaagcgaaaaggttttttacgcaactttttaaaatggtttgaaaaacagcaggagtttggtataataaggagaaacaggctcaaaacgagtgaatttatgacaatttgacgtgctgtgccacgcaggaggaatattgagttatggaattgaaaactgttcgcacgcgctacgcgcccagccccaccggctttatgcatgtgggcaacctgcgcaccgcgctttatgaatacctgatagcaaaatcgcagggcggaagctttatcctgcgtattgaggataccgaccagcagcgctatgtagagggcgctgtagatgtaatctataacacgttgaagaccgcggggcttatacacgatgaaggtccggatgtcggcggtgactttgggccttatgtgcagagcgagcgcagggatatgtacctgccctatgccgaacagttaatcaaagagggcaaggcataccgctgcttttgctcaaaggagcggctagcgtctttacaggaggattccgcgggaggcggctacgaccggcactgccgcgatttgccgcaggaggagattgaccggctgttaaaagaaggggtgccctacgttatccgccaaaaaatgcctcttgacggctccacaacgtttgaagacgccgtgtacggcagtattacggtggaaaacagcgagctgcaggaccaaatcctcatcaagaccgacgggtaccccacctataattttgcaaatgtcgtcgacgaccatacgatgggtatcacgcatgttgtcaggggcagcgagtatttaagctccacaccgaaatacaacctgctgtacaaagcgtttggctgggaaattccaacctatgttcaccttccgctgataatgggcaaaaacgaggacggcagcgtttccaagctttcaaagcgtcacggcgcgactggttttgccgatttgataaacgaaggatacctgccgcaggcaatcatcaattacattgcgctgctcggctggtgcccaaaggataaccaggaaatttttactttggaggagctttgcagggcgttctccatagacggcatcagcaaatcgcccgccgtgtttgactacggcaagctttcctggttcaacggcgaatacatcaaggcgatgcctgtggaacagtttgcggagattgccgcgccttatttcaaacaggcgctttcagacaagccgtttgattatgtaaagcttgcctcgattttgcagcagcgcgtcacgcagcttacacagataccggaaatggtcggtttctttgcccggcagcctgaatacggcacggagctgtttgtcaacaaaaagagcaagacgacgcttgaaaattcgcccgctatgcttgcggccgttatagaggagctcgaaaagctgtcggagtggaaccacgacggcattcatgactgcttaatcggccttgcgcagcggcttgaggtgaaaaacggaaccgtcatgtggcccgcgcgtatttccgtgtccggaaaaacggttacaccaggcggcgcggtcgagattctcgatattctcggcaaagaggaatccctcaaaagaatgaagcaggggcttgcaaagttttgattccgcgccagtacggcggggggttatcacccgggctgcgggataaactatatgtgaggtaataggaggaaggaacatggcagaagaaatgaaaacggcacaggagccgtccggtaacgccaattttatccacgattttatagacgaggacatcgcaaagggcgggcagtttgaaggaatgaccgtccatacgcgctttccgccggaaccgaacggctacctgcatatcggacacgcgaaggccatttgcatcgatttcggcacggcggagaaatatgcgggcaagtgcaacctgcgtatggacgataccaatcccacaaaagaagacgtcgagtacgtcgacgccatcaaggaagacatcaaatggctcggctttacgtgggacgaccgcttttactttgcatccgaatattttgagcagatgtacgggtatgcctgcgagctgattgaaaaagggctggcctatgtatgcgagctgacgccggaacagatgcgcgagaaccgcggggaccttacgacgcccgcgaaaagcccgtaccgcgacaggccggcggaggaaagcctcgatttgttccgccgcatgagggccggcgagtttgcagacggcaaaatgacgcttcgcgccaaaatcgatttggcttccggcaactttaacatgcgcgacccggttttataccgtatcaaccgcatcacgcaccaccggacgggggatgcctggtgcatctacccgatgtacgattttgcgcatccgattgaggacgcaatcgagggtgtgacgcattccctgtgttcccttgaatttgaagaccaccgcccgctttatgactgggttatcaataatacaagcgtgaaaagcaagccgcgccagattgagtttgcgcgcctgggcatcaatcataccgttatgagcaagcgcaagctgcgcctgctcgttgaggaggggcatgtcggcggctgggacgacccgcgcatgcctacgctctgcggactgcgccgccgcgggtatacgccgcgcgccatccgcaatttttgcgaccgtatcggtgtttccaaggtcaacagtaccgtggaatacggctttttggagcactgcctgcgggaagacctgaacgaaacggcaaaacgcgttatggttgtgcagcatccggtaaggcttgtaattaccaattaccccgaaggtaaatccgagacgttcgaggtggagaacaacccgaaccgcccggaggacggtatgcgcaccatcaccttttcacgtgagctgtacattgagcgcgacgattttatggaaacgcccgtcaagggctatttccgcctgttccctgaaaatgaggtgcggctcaaatccgcgtatatcgtgcgctgtaccggctgtaaaaaggatgaacaaggcaatgtggccgaggtttacgcaacctacgaccccgaaacgcgcggaggcaacgcaccagacggcaggaaaataaagggtaccatccactgggtggacgcgcagacggcggtagacgcgcaggtgcggctttacgataacctgtttaccgtacccgacccggacgctggcgacaagaatttccttgattatttaaacccggattcccttgtcacgcttgaacactgcaaggccgagcagtccatgcgcgacgttgtgccgccgcagtcttaccagtttatgcggcttgggtacttctgcctggacaacaaggattcaaagccggggaagccggtgtttaaccggagcgtttctctcaaagacggcttcaagacaaaaaagtaaggctgtaaaaataaacatgatatgaaagggcgcgaacggatgatgttcgcgccctttttagcggggatatatagcaaataagctcaaattaaacgtaatgataccgcttgcggtattttataaagaaaaagacggtgagcgcaagcgacaaaaactccgccaccgggcaggcgagccatacgccggtaatcccaagcagtatggaaaggctcagcagggcggccgccagcaaaacgagcgtgcgcatacacgacaaaagcgcagaaaccggcccgttgctgaaggcggtgaacatagcggaggcaaatatattataccccttgaacaggtagctcagcgcgtaaatttgcagtcccgctgatgcgagcaggaacacctggctgtcccgcggggcgaaaaacgaggtcaaatcgcgcgagaacaggaacgtaagcgccgccacgcttacacctacggcggttaacagccccatactgagcctgaaaattttcctgagcttttctttgttcccgcagccgtagttatagctgataagcggggcgacgcccatcgaatagcccaggcagactgctatgaggataaaatcgaggtaaagcaatacggaaatcgcggcgacgccgtcgtgaccgacaagccgcatcataatgatgttgaacagaaacgtggtaacactggtagataaattgcttaccatctccgacgaaccgtttcccatcgcgtgcaggaacacgccccacgcctgcttcggccttacaaaatgcaggttgccgcgccggttcagggcaaagtaaaacagcccgaataccgccggaatggcgttgccgattccggtggctaccgccgcgcccgcaatgcccatatggaatacggcgataaacaggtaatcgaataccacattgcatatacctccggcaatcgtcatagcaagcccaatggagggcttgccattcgcgatatagaggttctggaacatcagctgcagaatacagggggcggcaaaaagcatcagcgggaacgcgtagtcgtagcaatagccgtagacagcctcgtcggcgccaagcatataaataatatcctttaaaaacacagcgcacagcacggtggcaatcacgccgatgacaatcacgacaagcaaaacaaacgtgaggttctcatttgcctcgcgttgcttgccctctcccaattttctggagacaatcgcgttgagtccggtgccgaacatcgtgcccagagcaatagcgacgcccagcagcggaaagacaaggttgaccgcagaaaaggcctccgttccaatcagccgtgcgacgaacaggccgtctacgatggaatagagcgacatcacgaccatcataaccattgacggcagcgtaaacctcagtaaagagggcaatgttattttttgactaagtgccttgttcatttcctatatccttccagtcgtattgtgaaattgcgcgcaggatttctgaaaacgataaaagctgctcctccgaaaaggacttacgcagctcgtgctcgatattgcggaaaacatggttataaattgagaagtttttttccatgtcgggatggattttaatataaaatacgcgcttatcgtcctcgctttgtgtttttataacggcgccctgcttaatgagctcgtttaccttcgatgtcgccgccggagctgaaatctggagcgcctgcgcaagcttgcccgtcgtgcagctttccatctgggatattacattcaggtacaggatgctgttatatgaaaagcctttataataatccttttgatttaatacccgaagctcatagagggccatatgatagtaaaaacggtcgatttcgctgagtaaatccataacgccgcctcctgaatgattaagctaatttatttaaatttacttaattatatgcgttgcctctttttctgtcaagttctttttttgtaggcagcgccgcagtttttggtaatccttacgaataacgtatgtattttttgttcccccgttcccgcttttatcctttacagcattttgcgtgtgtgttatagtatgaatagacaaaaagcgatttattttttaggaggatagttctatgaaaacatttctaaaggtcttatgggttattgcgggcattgttttgattttgggaggctgcgcggcgttttttaacccgtttaaagcgttcgttgtaacagaggtcatccttggcgcggcgcttatcatttccggtattgtgagcattatcgcttatatccgcacacaaaagcatatgctcggcgcgggctggatccttgcggaaggaatcctttccttaatcctcggcctgcttatctgcttcagcaaatacagcaacggtctgtttgcaattacggtatcgaccttcctcggcctgtggcttttgttctccggcgtttcccagatgattcgctcgttcgacctgcataagctcggcgcgcacggatggggctggattaccgcgtggggtattatctgcattatcggcggcgtcgcggtgttctgcaaccctgtaataacggcggtcggaacggcaagctttttaagcgggattgttttgatattaggcggcatcgcggcgttggccagatgcctgacgagggatattgaggactaaccaatttaacagaaccagagaaaaagagcaagcctttgcaggcttgctctttttttgtttacggctatgatttttattttatgcagtgtggtttcaattcacataacacgatactcaatattcaaatatgttaaaattatttgtagaaaacattttgctaaaaggttaatgggactgttgtgcgtatttatggacgcaatgacacgaaattttgatttaatctgttttaataagggggataaatttgaaaaataaatgggaacaatttttacgccataagttatttttgtcctttttaatcaacgctgttatgcttgtgctgtttctggcttgtaccaggcttatgtatgagaccaacgacgattacgcaatttccagattgatttctgtatttaaagagacgtcaatcccttatttaaatgcgttgctgtccgggctgctgggcggattgcaaaatgcagtggcgttttgcaatctctttgtactttaccagcttgccgccagttatttatccttttgcgcggttacttacgtatttctcgataaatttaaatggagattctccttacctgcgtctctggctgtcataatcctgtttggctataaccattatgcgttgattcagtatacgaagacggcgtatttattatcggttgcaggttttctgctcatggttcatgcgtcttataaaggaaaatctgtccgtatgtgtatagcaggcggggcgcttgcactgtttggatgttttaccaggagcgattctttttatgtcgcagcagccttcacagccgtttttctcctggcgctttttattgtatggatggcccggagaaagaaaaaagaaagggatacgtttgtgtctttgctccagctaaaaaagaagtacctgatttcgtggacactgttcgccgcagctgttctggcttcagtttttgcgtcagcgcagatatattcaggcagagatggctttgatgaatataaccgcttcaatcaagcgcgtacggcgacgctcgattatccgatacccgattattcaaataacagggagttttattcgcagctcgggctggatcaaaacgacatcaatatgtatagaagctggaatatagataccaagatttttacagctgagaagctggagaaaattgccgcgcttcaaaaagagcggcagccgtcgtttgttgaatattatattcaacaaaccaaaacgttttttcatgatgtatcttccgcgttagctttaccgggcggaagctttgctgttttgttcctgttaatttgcgccgccttgatatttttgtcggttttactgctgaaaaggttcccgcttttattcgcagtattctgcgccgcactgtccgtaacattatattttgctcatgtgaacgcgtaccgcggcctgttttattttacggttttgctggttgccgcagccttttatatggcgttattccagaaaaaaatgatagtggttccgttgacgcttgtaggcctgtctatggttctggtgatgtatttggcttatacacagagactcatttaccgcgcggcctatgggattttcctgtgtgccattattttgctgatttattcggtggaagcaggcgcactgcgggaacgggtatatagcgcgtcaaaaagctggaaaagatgggccgccgtttcggcctgcgcggctgtaatcgtctgcggtgtactgctgtttgagggtttatcagccaggcagacgcattatccggttaaacaagggctgatgcactacctggaacaaaaccagaataagctgtatttgaaaaatgcttcggccggcggtatttatacatataacatggaatatcccctaaaaccgtttgattcttaccaatgtgaaaacttggcaagctttggaagctggctcagcggctcaaaatatgaggaggatttgctccggcgttatggaataataaatttgtatgaggatattatcgataacccgaacgtatttgttattgcccaatcgggaacaatacaaaagctggaaacgtatttaaaccgccattacagcccttccggtcaaaccaggattgtgttacagcaggctgaaacggcaggcgcaacgccgctttaccgtgttgtgaccgtcccaaattaaatacaggcttctgcgccgtacgacaggtttctgccgtacggcgtttttctttttacacaggttttactttcccttgcattccgtttttacaaaacgaggttatagtattggtcgtacaagagaaaaggtacattactatatgaaatagtcaaaggagaaacgaaaatgaaaaaagcagcttctattttacttgccgcggtcatgtgcgcggcgctgtttgcgggatgcagcaacagcaacacctcttcccaggattcatcaagcgcagcgggtacaagcgcgcagagctcgcaggcctcttccggcggttcgttcgacacaagcaaggatattacggtcgtaacgagggaagcgggttccggcacaagggacgcgttcacagagcttaccggcgtgctggaaaaggatgacgcgggcagcaagaccgacaacacctcgcagggcgccgttacggtcaacagtacacaggccgttatcagcaatgtaacgggcaacgagtattccatcggctacatttcacttggttccctcaacaacaccgtcaaggctgtaaaggttaacggcgtagcacccagcccggagactgtaaaggacggcacatacaaaatttcaaggcctttcaacattgcaaccaagaaggacgtaagcgaagccgcacaggactttatcagctacatcctcagcacggagggccagaaggttgtaaccgacaacggctatatcgcgcttgacgacacaaaggcgtatgaaggcagcaagccctccggtaagattgtcgtagccggctcgacctctgtttccccggtgatggagaaattaaaggaggcctacgcggaggttaacccgaacgctacggttgaaatccagacgagcgattcctccaccggaatgaccgccgcgatggaaggtacctgcgacatcggtatggcgtcaagggagcttaaggatgaggaaaccgcacagcttacggcaacccagattgcgctcgacggcatcgcggttatcgtcagcaacgataatgcctgcgaggacctcaccatggaccagattaagtctgtctacacaggcgaaatgaaaacctgggccgacgttatcaaataagaacggtaaaagatataagaagtatcacagcatccccaagaaggggcggttttaaagccgccccgttttttggaatcttaggaaatttacctgtaaaggtttgagtggtaatatgaagaaatttttagaggtcttcatgaagggcgtgttttttgtcgcggcgctgacctcagtcacggctgtcgtactgatttgcgtctttcttttttcgggtggtgtccccgcaatgggggaaatcggcgtgctcgatttcctgttcggacaaacctgggcgccgcagaactcgcccgcaagctacgggatattcccgatgattgtcggcagcgtatacataacgctcggcgcggttataatcggcgttcctatcggcatattgacagcggtgttccttgcaaggttctgccccaaaagtatttataaggtgttaaaaccggcggtcgacctgctcgccgggattccctccattgtatacggctttttcgggctggtggtcgttgtgccctttatccgcagcacgttcggcggcaacggcagcagcatcctggccgcgtcgcttatcctgggcattatgattctgccgacgattatcggcgtatcggagtcagccatccgcgccgtgcccgacagctactatgagggggcgctggcgctcggggcgacaagggagcgcagcgtgttccgcgcggtgctgcccgcggcaaagtcaggcattatggcggggattatcctcggcatcggccgcgccatcggcgaaacgatggccgtcgtgctcatcgcgggaaaccaggcgtggattcccggcggcatcctggacggcgttcgcacgcttacgacgaatattgtgctggagatggggtacgcgacaggcctgcacagggaagcgctcattgcgaccgcggtcgtgctgttcgcgtttatcctgattatcaacctgctgttcgcgttctttaacaggaggaataaaaagtgaagccaatcaatcaaatgacatggagacaaaagctttcctcatataagcgccgtccctggtcgctcgttttgtacctggttgtcctgcttgcgactgtgcttacggtcggcgctctgctgttcctgattgggtacattcttgtgatgggtatcccaaacctcagctgggatttgttttcgtgggaatataactccaataacgtttcgtttatgccggcaatcgtcaacaccgttatcatgacggcgttatccctgctcatcgcggcgccgctcggcatctgctcggctatctatctggtcgagtatgcgaaacggggaaataaaatcgtgggaataatccgtacaatggcggagacgctttcgggcatcccttccattgtatacgggctgttcggcatgctgttctttgttacggcgctgcgctgggggtattccctcctgtccggcgcgctcacgctttccattatgattctgccgcttatcatgcgcacgactgaggaagcgcttaagaccgtgcccgatacctaccgcgagggcagcttcgggctgggggcgggcaggctgcgcacggtattcaaggttgtgctgccgagcgctgtgccgggcatacttgccggcgttatccttgcggtcggcaggattgtaggcgagacggcggccctgatttacacggcgggcaccgtcaccgacatgccgaaggatttgatgtcctccggccggacgctcgcggtgcatatgtacgcgctttcaagcgagggcctgcataccgagcaggcatacgcaacagcggtaatcctgctggcggttgtgctgctgattaatacgctctccgcttttattgcgaagagggtagcgaaataagaggggaaaccatggaaaggatgcagaccggtatggataaattcaatattaaaaaccttgatttgtattatgggaagtttcaggcgctcaaggatatcaatttaaggattcaggagaaaaacatcaccgcgttcattgggccttctggctgcgggaaatcgacgcttttaaagagcctcaaccggatgaacgacctggtcgagggctgtaccatcacgggaaaggtggagctcgacggtgtggacatctacgcgaaaatggatgtaaacgagctgagaaagcgcgtgggaatggtgttccaaaagcccaacccgtttccaatgagcgtgtacgacaacatcgccttcggcccgcgcacccatggcgtacacggcaagaaacagctcgatgaggttgtggaaacgtccctcaggaacgccgctatctgggacgaggtcaaggacaggttaaacaaaagcgccctggggctttcgggcgggcagcagcagcggctttgcattgcgcgcgcactcgctgtaaaccccgacgtacttttgatggacgaaccgacgagcgccctcgacccaatttccacttcaaaaatagaagagctggcgcttaagctcaaggagcggtattctatcgtcattgtcacgcacaatatgcagcaggcgctgcgcatttccgacatgacggcttttttcctgctcggagatatggtggagtatgatacgacggacaaaattttttccaccccgcgaaacaaaaagacggaagattatattacagggaggtttggctgatgagggcatactacgatttacagctcaaacgcctgggcgacgagctgaccgagatgggcgcgctgatagaaacgtccatcgattacgcgaccgacgcgcttttaaacaaggagctgcataaggtggaaaaggtcagggcatatgagaaggcgatagaccagaaggagaaagatatagaaagcctgtgcatcaagctgattctgcaccagcagcccgtcgcaaaggatttgcgcctgatttcagcggcgcttaaaatgataaccgatatggagcgcgtaggcgaccacgcggaggatatttccgaaattgccatgctgcttgccgacagtgagcaaacaattgaaatctgccatatcaagcagatggcaaaggccgccgcaaagatggtgaccgccggggtggacgcatttgtgcgcggcgacgtcgcgcttgcggcatccgtgtgcgaaagcgacgatgttgtagatgggctgttcaacatcgtgcgcggggatttaatcgattgtatccgaaaggacgcgcagaagggcgcgggcgcgctcgatttgttccttgccgcaaagtactatgagcgcatcggcgaccatgccgtcaatattgcggaatgggttatttattctgttaccggccggcacgacagcatagacgagctggagggtattccgggaacggcggccgtgttgggggatattaagctgtaaaccgcccatgctatattgaaaaagacgacaaagggccgcatccgcggccctttgctgcctataaaatttcatgtctgatacgatattttacgtattttttactaagataaaaaagtttttatgatataataaggatgaaaagcaatagaatgaggtggtttgccgtgatttatatcgtggaggacgacagggatatccgcgaaatggagtgctacgctttaaaaaacagcgggttcgaggtgcgcccgtttgaggacagcaccgggctgttcacggcgtttgccgccgagaaaccgaagctcgttttgcttgatatcatgttgccgcaggaggacggtttaacgattttgcagaaaatcagggcggatgaaacgctctgtgccgtcccggtcatcatggtcaccgcaaaatcctctgagcttgacaaggtaaaggggctcgacatgggcgccgacgattacattaccaagccgttcggcgtgatggagctggtatcgcgcgtaaaggcgctgctgcgccgctgtgagacaaagcaggagccggtcgttttaagctatgagggaatcgttgtggacgacttccggcacagcgtcacggtggacggggagcgttgtattttgacatacaaggaatacgagctgttaaaatacctcattgcgaataaagaaattgccctgaccagggaaaagctcctggaaaaggtctggggctacgattttgaaggggagagcaggacggtcgatatgcatattaaaaccctgcgccagaaacttggcgaaaaggggagcctgattaagactgtccgccatgtcggctataaggtaggggaggaataatgaagctcaaaagcaaactgaccggcaggctgtgtgttatcgggctggtgtcggttattctgaccgcggtgtccgcaacactggccttctggtttattttttcccagcaggcgcaggacgacctgaagacgagcggcgcgctgcttgcaagcgcttacgaccagagtgccgcgccgtctggggaggcgctttccaaaattgcctcggaggaatacaggattaccctgatttccccggatggaaccgtattgtacgagagcgacccgcaggcgtccgaagaccgcatggacaatcacaaagaacgcccggagataaagcaggcgctcgaaacgggcgacggctcgagcgcgcgtgaatcggacacggtcggccgggtcacatattattacgcggtgcgcctgcaaagcggggacgtgctgcgcgtatcaagacaggtggataatgtattttctgtcttcggcggcattatccctgttttaattgtaattaccgtttatgtgctgcttgtatgcctcgtcatggcgtctgagatgacgaagggcattatccggccgattgaaagcatggccaaagacccggatgcggtagcttatgacgagctggtaccgttttcgaatatgattgagaagcagcgcggggaaattgaagagcagatggggcggattcagcaggaaaccgataaaatcaatacgattattgccaacatggaggaaggctttgtcctgctcgacggtgaaaagaatgtgctgatgcacaacgacagcgctgtccggctgctgcaaagcgggccgggggagctcatcgggaacagctttatacggctttcgcgcaatcaaaacgtaaaccattgtattgattccgcgtccaagggcaaaagccgcgaggccgagtttgaggttggggagcgtgaattacagctgcttgcaaacccggtttactccaagggagagcaaatcggcgttatctgcattattgttgacgtgacgggcaggcacgcgctcgaccagatgcgccaggaatttacggcgaatgtatcgcacgagctgaaaacgccgctgacgtcgatttccggctatgcggaaatgattgaaagcggtatcgcgaaggacggcgacgtaaaaacctttgccgcgaaaatccataaggaggcgggcaggctcgtcaccctgattggcgatatcatccgcctttctcagcttgatgaagagccgtcgcaggtgcagcccgtgcgggtcgatatggcgtcgctcgtggaggaatgcacagactcgctcgtcatttctgccgataagcataaggtgtcgctcgagacggacgttacgccctgtacggtgcgcggcgaccgcaatatgctctatgagctgatttataacctctgcgacaacgctatccgttataataaagaaaacggctcggtgctggtatccgtaaagccccgggacgggaaggtcgtgctaaaggtaaaggatacgggtatcggtattccgaaggagcaccaggcacgcatttttgaacgtttttaccgcgtcgataaaagccgttccaagcagacgggaggaacggggctggggcttgcgattgtaaagcatatcgccgagcagcataaggcgcagatttcacttgaaagcgaagaaggcgccggctcggtaattaccgtgacgtttgaacggtaagcttgaaaagcgcccgcaaggcgttataataaaaattggacggtaaaacagggaggcgcaaaaaaggggcttgcgcctcccttgtagactcttgattttgaaaaacggctgatacgcatatgtttttaacatgctggaataacctgtgaaatgcaggggaacgctagacctatcaagcaaaaggaacgggatgccatatgaccttcaaaatgtccaaaagaaataccgtgcgtgtgattagcttttcctgcgccgccgttttgctcatagcgggcgccgctgtgtcggggttccagctcgtgtcacgctaccgcgcgacgattgagcatacctaccagcaggcgctgagcgaattttcagattattttacaaacctccagtccgcgctcaccaagggcgtgtacgcaaatacccagacacagcagtatgggctcgcggtcaagctcgcgggcgactcccagggggcaaaggccgcgctttcgcgccttcctctttctaacggcgaggacgacgcgctgcagaagtacctggcgcaggtaggggatttcgcggagtatgtcaccgcaaagctttcgcgcgggcaggagcttactgaggatgacaagcaaagcctgtcaaagctaagcggctacgccgaaaaggtatcgggccagattgaagagatatccgcgcgctacggagacggggacacttttattggccaggcgcagaaaatcgaggggaaccttgagcacgtcaatacgcagacggcggaaaatacgctggacaaaagctttacccaggtaagcgaaagctttgaaaattatccttctctcgtctatgacggcccatttgccgaccaggtgcagcagaagaagccgcgaatgctcgaaggggccgagggcttttcaaaggccgaggcgttaaagaacgccgccgcgtttttaaacacatcagatacaagcatcttttacaactcctccaggcaggggaatatgcctgtttatcaattcaaaaacgatgaggtatacattaccgtaacgatgcagggcggatatatagaggaaatgtaccgccagcgcgaggttgggaaaaagcagatagatttcgaaaccgcggtggaaaaagcgcagcagtttttaaaacagcgcgggtactataatatgaaagagagctattacgtgacctccggcggagtctgcacgataaatttcgcctatgaacaggacggcacggtatgctacagcgatttaatcaaggtcggcgtagcgctcgacacgggcgaggtcatgaccttcaacgcctccggttacctgatgaaccattatgaaagggaaatcgcacagccaaagcttgagcaggcgcaggcacaggaaagcctaagcccgctgcttaaatccgaaagcgcgcggcgcgcggtcattccaaccggcgggacgagcgaggtatcctgctatgagttcacctgtaagggcgaaggcgacgacagggtgctggtatatatcaatgccgacacggggctggaggagcagatattcatacttctgcagtccgatggcggaacacttgtgatatgacaattatttgttgcttttgcaacattgcaattttttgaaactgtggtataataatgacgttaccggaggaaagcggattcgcctttctaatgggcagcaacctaaaagaaaaacaaaaaggagagcttgctatggatacctatatttgtgacgtatgcggctgggtttatgatcctgcggtcggcgacgaagagggcggtattgccccgggcgttgcttttgacgaccttcctgaggactgggtatgtcctctgtgcggagttggcaaggaccagttttccaagcagtaatacgaatagagaagtgtttaccggagggcctgtaccctccggtaaactgccctttgcaggcaggcaaaagcataaggagtgatacataatggcagtaaacaaaatttcagaccatgtctattcggttggggtattgaatccgtctttgcgcgtgttcgacatcgtgatggaggcaaaatacggaacgagctataacgcttatctgattgcggaccaaaagaccgtactggtcgaaacggtgcatctcgactattttgacgaatatatcaataatatcggccagcttgccgatatcggcgcaatcgactatttggtgatgaaccacacggagcttgaccactcaggcagcgtgctcaagctgctggagctaagcccgaatatgacggtcgtctgcaccgcggcggcgaaaaaatacctgacggcgattacgaacagggaatttaaatgcatggtagtaagagatggcgcggagcttgaaatcggcgcgcataagcttaaattcgtcgttgcccccatgctccactggccggattctatgatgacgtaccacgaggatgacaaggtgctgttaagctgtgattttttgggctgccatttttgcgagccgcaggtgttcgatacctgtatcaaatacccgaaggcttatgaagagcaatttgcctactattatcagggtattttcggcccgttcaagccgtatgtgcttgcagggctcaataagattaaggatttggagcttgaggcggtatgcccaagccacggccctgtcctgacgaaaacaataaaagaacgcatggacgattaccgcgtctggagcacgccgcaggaaaaaacggagaaaacggcggcagtcctgtatgcctccgcctacggctgtaccaaacagctcgcggtaaaggcatttgatacgctctgcgcctgcggtattaagacgcagctgattgatatggtgacggctcccgtttggcagagcgcggcagcggtgcaggaatcggatttggtgttgattggttccactacgataaacaaggatgcgcccaaggttgtgtgggaggtgctctcctccattgacgcaatcaacattaaaaacaagcccgcggcagccttcggctcctacggctggtcgggagaagcctccgttatgataaaccagcgcctgcaccagctgcatttcaatgtgcttgacgagccaatccgcgcaaactttacgccggaccagtgtgaccttgacaccattgcgcaggcggcgcaggacctttacgacaaggttgcctgtaaggcctgtcaaaaataaacgcccgtatttgtttgatttggaagggaaagatgcttatgagcaaggaaaacccgattaaaggcgttatattcgatatggacggcctgctgctcgatacggaacggctgacctacgatttatgcagcaaggcggcggagcagatgggctttacgctttctatggagctttttaaaacgaccgtcgggctcaggagcccggataccagaaaaatttacgagaaggagttcggggaaggctttgattacgaccgcctgcgggaacagaacatcgcatggttctgggaatatattaaagaaaacggggcgcctgtcaaaaaaggcgtatttgaattgctgtcctttttaagggataatgagataaaaagcgcggttgcgacctcgaccagcagcgcgacagcgccgcggattcttgaaaaagcggggattaccgtttatgtggacgcggtcgtctgcggggatatggtggagcggggcaagcccgagcccgatattttccttgaagcggccaaacgtttaaagctcccgcctgagcagtgtgtggggcttgaggattccatcaatggcattctctccgtatacaaggcgggcatgctgcccgttatggtgcccgatcttttgcctccgacggaggaggttacctccctgctgtacgcgcaggcggacgatttggagcaggttatccccattattaaaaagcataacgttaggttttaccaataaagaatccccggctctaattcagccggggattctttttaccctatattttttatatgctgataaatcggctgaaaagctataggaatttagaggcgcctatctttggagctcccctttaaccgccatagacgaccggccgacctcttcaaagcgctgctccaggataccgcgctcatagcggacggaataggtgtaattcgggtcgttgaaatagtagtagtccgcgtcgtagcctgtgagaaccaggcaatgctcgtttgcaatccacatgcaggtatcgccgtcctcatagggagagtattctgccgcatcctctaccgtccactcatatgtaataaacggctcccacatatacatggtcgcccagataagcaccggcttgttgtatacgatataattacgtatcatgctttcaagcggcgtcccggtcgtcacgaccgcctcgttgccttcttccagcacctgcccagcggcgtgcgccatgacaggggggaaacagccaagcgattcagtcgaatacgggctgccgataaacacggatgaggtgtccggcccgtaaagggaaccgtcgctttcctctcgcaaaaaaccggtcggtacatggtcgtcgataaaatcataaggggaaatatcgtagccgtaatattgcagcagcatcgttgtgctgatacattcacagccggaggggaaatcatcccattggcataaaagcggtacgtcctcaatgaaccactcttcaggcagctccgcccgcacgacgcatacggcggatttgccgtcgtccgtgacggcaaacaaagcggtctgccccattgctttcattgtaataacgccgccttcgtcaaccttcgcaacggaggaattgcctacatgccatgtgatttttccggtcagcccatcccgcggcgttacagttaaaggaattttgcgcggctggtagagcacggcgctgtatagcgcgtggtcaaagctgatatcttttgcctctgccggagcagccgtgctcccatccgctgcgggctgttcagcctgcccggccgcggcattgatggaacccgccatgcttaacgagaaaaacaggaggcaaagcagggcgcataaggcccttttgcaccgcttcattctctttgcaacccctttccttaacccatacggcccgattgaccgttgttcaccacacgttgcatatgctgctaaaatatagtatactgaaattaaactgtacacattgagagggacaaccttattttaccatatggaaccggtgttgtcatgctccatatgatggaatttgcatagaaagggaacgttacggatggctttgatttttgatgtacacgcgcattacgacgacgaggcgttcgaaaaagaccgcgacgcgcttttaaccgggctgcccttaaagggagtatgcgcggtggtaaacggggcaaccgatgaaaagacagcgcggatgggactttcatttgcgcggcgttttccttttatgtggacgacggcaggctaccatcccgaatgcgctgacaaagcgccggacggatacctcgatacgctctcagcgcttttgcagaatgataaggcggtggcggttggggaaatcggccttgattactattggaaggaagtcgggcgcgaggttcaaaaaaaagtatttgaagaacagcttggacttgcctgcgatttgggactccccgtagtcgtgcacgacagggaagcgcatcaggatacctttgaactgcttaaaaaatatcgtccgaaaggctttctccactgcttttccggcagtgtggaaatggcccgtgagattataaagctgggaatgtctatcagtatgggtggtgtcgtcacctttaaaaatgcgcgccacagcgtggacgtcgtgcgtgaggtcccgattgaccggcttttgcttgagacggacgcgccttaccttgcgcccgtcccatgcaggggaaagcggtgcgattcgacaatgattgcttactccgccgaaaggatagcggagataaggggaatttctgtggaagagctgcttaatcaaacaaaggaaaatgcctgccgcatgttttccgttaccatataaaggcaagggggaaggccgcacatgaaaaaatgctgcgctgtaatcctgtgtatactatttgctttctgcacggccgttcctgccggggcggcagaggcagtggtctggtatgggcttaatattccgtcgcaggcggcagcaggaaagagcgtttccgcacagattgtgctttcctgcggcagcggctgtggtttgggcgctatgctgtttacggtggaatacgacaccggcgcgtttacataccgtgaggcaaaactatctgctggtgcgcctggtgagctgcgcgcgtacgacggcaatggcgtattaaaagtaatttatctcaatacgtcgggtacggcgctcagcgccgatagcaaagacctgatatccctgaggtttacggcgtccgcctccgaacaaaaaacaacgcttaccttatacggcgagcaggcggcgagcgcgaaggaacaacggctttcctatggtaatccatctgcgtacgatgtgtctgtacagaagaaagtgtctgatagccccgcgcccgcaaaggcccgtaaggtgacggcatcctcctcaaaaagcccggcgtctggctccaaaaaccgcgtttcagccggagcgggcagccaatctggggcagagggtaacgggggctatattgacccttgggaacagaatcaaacgggagaaacctctgaaaacgaaggcggcgggttcctggcgtttggggagaacggctcgaacccctttgaaaacaacgggttctggcttatcgtatgcgctatcggcctggcagctgtaattgccctgctcgtttttaccgcttataggctgggccaacgaaaaaaaggcggccttgcctccggcgaagaaaaaggttcggaaaaccatgaagaaatacaggcggaagagcccggggacaaggacggacaaaagacgcggcaagaaataaaaaagaaggagaatgagccccatgagcaataagggagaaaaggcaatggaattgtttaagcagggctataactgcgctcaggcggtattcggcgcgttttgtgacgaaacgggattcgattttgaaacggcggtgatgctcgcctcacccttcggcggcgggatgggcaggctcagggaggtctgcgggactgtttccgggatgctgatggcggcaggtatgttgtacggctacaattctcctaaacacatacaggagaaaaaggagacttaccaaacagtacaggggcttgcagacgcatttaagaggcgtaacggttcaattatatgcagggagctgctcggccttacaaacgtgcaggcggacgattccccgcagccggagccccgtaccccggcttattataaaaagaggccgtgcgcgttgcttgcgcaggatgcagctgaaatattggaagcttatataaaggaaaatccgccaaaggagcggtgatttttggttttatgtataactttttgggtaacggcatataatggatttatacagcggcagattttttcttgacaaacaaataaggttgtgctattattataaagctgtccggtaatgacagccgctgccttaaagtggggaatatatttctacgctgaggcaagacgtttaagtatatcgcggagtggagcagttggtagctcgtcgggctcataacccgaaggtcgtaggttcaaatcctgcctccgcaaccagtgggagtatctgtaaaggatactccttttttgtttctttcatagaactgtaaaaaatattctgattattttcaaaagaagccgacagcagataagccatcggcttcttttgtgtttgcaggccttctgcttcagacgtgaaagaacgattgcggccactggataatttttatgtagttttttagatttttcaagaacccctatacgtttcttcaacataaaatataatcagagaggtgacttatattggattcatgctcgctgacattcagcgtaactgccattgcaaattttatttcagaaaaactatctgacgatgagcttgcagtcgttggaacgatttttacacagcttggagataccctgtccacaatattggcgcagcgggcgctctgttcgggaagggtgtccgccaaccctgtattacaaaaagacgggaacaataaactttgataatggagaaattaataaataagtcgaaagcaggcagtggcatataaaccttgtaacctgtatcaaattttataacagaaagcttttgccgtcctatagccagtcgggatatattgaaccttgcctgggctgtgctttccataagttgaaatgcttttgaaaatttctgaaattttcttgaaatttgttttttatgtgttataattatattaataaaatttataactaaggttgagggacacttatggttcggaaagtcacgcaaagggagattgcccgtcaagcgaaggtttcggtttcgacggtttccagggttttgaatcacaatgacgctttggtaagcgaggaaatgcggcgggccgttgagaaggcggcggaagagctccaatacacggggccgctgaaaagcaggcagcaaactgtgataacgccgcaggagaacaaaaagaaaataggtgtgcttgtcacaaaaatagagcatgactcgatagccgcgctggtggaagggattctggcagtggcagatagctatggggtagaggttgtgctgcagaaccatagggaggacgagcagaaggagctgcgtttcctggatactatgcggcgcggcggggtggacgcgattatttcaattccaataaacccttcccggctgaatggggcttatgaggaaatgattcgggagaaattcccgcttgtcctgctggtaaacgaggcaacccgcattacaagggacgacgtttgtgtggtgacaaaggactcctatcccggtacagtatccgggtttaaatatctgcttgatttgggacaccgcaatatcctgatgctgggtgcgcctggagcaaacgacagctacaagcggcggatttccgcgtatcgcaacgcgtgcggcgcggcacaatccgaatttcaggaagatatgattatcaattgctccgactcatataaagacgcttataacgtcgtgatggaggaatgcaggaacccgcgctttactgcaattttcgccatgtcggatacgatagcgtttggggcatggcaggcgctcaaggataacgggctgcgtgtgcctgaggatgtgtctttggtaggatacgataacctgaaggccgcgagatatatgggattgaccacggtttcggaaccgatgaaggaaacggggacctcggcggcataccttgcgatggaaaggcttggaaacaagggcgcgcagccgaagaaaaatgttttgcaggacagccttatcatacgcaattcctgcaagggcgtgtcccgccggcacgaatagcccggcagcgcccagcggtgaaaaaatttataaattgatgcattaaaccgaaggacaggccgcgtttgcggcttgtttttcgtgtccgccttgtccggtaaaggccggcgggtccataatgggaaacaaatgaaaagccttcttttacatcttcgcgggcatgaaacccgtttatgtaaaagaaggcttttgtgtttttccccacgccgcccgcgtttatcaggcaaaagaatccgaccgcataaacggccggattccaaatgcattattgcagcttatagctggatggaacagactctccgtttttgtattcgacgattgtggaagagccttcggactttccaaattcatcaaatgtaatatacccggtaactcccacaaaatccttttggccggctaaggctttgcgcacctcttccccggtgctcgccttagaggtctccatagaattgagcagcagatggatacagtcatacatcagcgcgatatgcgcttccggagcggctcccgtggcctctgtataacgcttgttgaaatcttcgtacttcgattttgtcgcatcatcgctggcgacgccgttctgtgtgtaaataaggcggccgtcaagctgcttgccgacagtatcgaataattcaccctgaatcgcctgataatccgtgcagataaacacgacgtcaagaccaagctctacaatttggcgcgtcatggacatgaattcctccgcgtccgcccttacccacaggacgtcgggctttgcctgcttaatctgggccagctccgtgcggaaatcatctgtgccggaattaaaggtgctttcgtaaacaacttctccgccgtattccttccagaactggttatagtacttgaacatatcgacggtctggtcgttgtagttgccaagcagcgcggcctttctaaagcccttctctttatagaggtactgggaagagagctttacggaaatttcattggccgcgtccaggctgaacacgaatccgttttcttcaaagattcccttatccgctgacgtaggaatcagggtggggattttcgcctcgtttacaatgggcttgaccgccagtacgcagctggtgaaaagggggcctaccaacgcatcgaccttggtaacgtcaacgagcttctgcgccgctgttacagcgcccgaagaggtgccggcgtcatcctcaatatagaaggtaacggattttccgccgatgcctccggcgtcgttaatttccttctgtgcgaaatccatcagctgtttcatttgttctcctaggaacgctgtgtcgccggtggtcgggccaatcattccaattttgacgtcttgtgacccttcaccttccggggagcagccggcggccaatcccaggattaatataacggcgagcagtgcgcaaagcagcttcttcatagtttccctccttgttcatcatcggtgtttatttctttcctgcgtgagcaactcccaaataggaagagataacctccgggtcgtgcataacggcctgcggattgccggaggcgattacctccccgaaattgagcacggtaatctggtctgaaatattctggaccacctccgtgttatgctcaataattacgactgttttatggtcctgcttaatgttgtcaatcagcttgagcatcttgtcaatcattacggcgttgaggcccgataagggttcgtccagcaggagtaccttgggcttggatatcagcgcccttgcaacctctacaagcttttgctgcccataggacaggtcgcttgccattgatttttcgtactccgacagcccgacatattcgagcattgaccgggcctcttcctttttttccttatagcttcttcttgacgacggtgtttggaagatagctgaaatcagcgaatcccccgacaggttttgttctccgcggacgatgttgtctaaaacgctcatgcgcggaaacaccctgaccagctggaacgtacgggaaatccctttccttacaattttgtatgggggcagccccgtaatatcctggccgtccaggaacaccttgcctccgtctggcttgagaaaaccggtaaccaggttgaacaaggtcgtttttcccgccccgttcggaccaattacactggcgatgtgcccttcttccacatcaaaggtcacatttttgttgactacgactccgccaaagcttttatcaatcccctgaatctgtaatatcgctcccataagtccaccccctagcacttcagcttaccaaacaagccctggggccgtttgataatgatgatgataagaagcaggctatagaggatattctggatttgctccgtgtaattgctgggcaggcccagaaggcctaaaagctccggtacgccgatgaccagcacggcgccggcaatcgcacctttcatagaacccatgccgccgataatgaccatggaaaccagcagcgaggaggtagcgaccttaaagcctgtagggtcgcagagcatcatgtagtggatatacatcacgcctgccacgcccgcgaagaacgcaccgatgcagaaaatctgcacgcgcagggacgcgacgtttacgccgcaggcataggttgcgatttcatcctccctggtggcctggatgctcttcccgtaaggggaatttagaatacgggaaataataaagaagcagacggcgcagatgataacgcaaagcagcaggtacatgggcaggcttgcaaagctgattccgaaaatttccgggcgcatcagccctgaaataccaatcgggccgtttgtaacatccatccagttgtttgcaaccgtataaatcaccacggcaaagccatagctgcaaaacgtaatatagtcgcccttcagcctgattgacggaaagccgataatcatgccgaaaacagcggcgaccgcacccgccaggagaagctcgaggaaaaatggcaggttcagggacgtagccagcagcgcgcccgcataggcgcctacggcaaagaaaccgccgtggcccatatggaacatgccgccgtggcccataatcaaatccaggctgacgctcagcaggctgtaaaccgctatcaggattaaaatactgaaaacgtaattcatatatatgcccccccttacgccttttcttcaatgccgaatacggaaggcttcagcagcataaacaacacgataagcaccaggggaatcgcgtcccgccagccgctgccgataaagagtatggcaaagttttcgataaacccaataagcagcccggcgaacagcgcgccgcgtatatttccgacgccgcccacaatggacgcgacaatcgctttcagcagggcggtggagctgatggtaggccgcaggtcggtgtccatgctcagcaggatacccgcgaccgtagccaggaccgaaccgagcgcaataacaataatatataccttctccacatcgatgccgactaccttggccatccatttgtcgttggaaatcgcacggatgcgggtaccggttttcgtctttcttaaaaacagcgtgcaggccgccataaggagcagcgccacaacaaacgagacaatctgcacgcttgtggcatgaacgtccggcgtcaattcaaagctttggggaattcccccgtaaacctggaccttggagctgccgaatatcattgtaataatcgctgtggccagcgtagcaatagccatggaaacggcaaccgacgtccaggaaggcacgcgcttttgtcggaatccatgatagcatacgcggtcaactaagagcatgagccccgcggtaacgatacatgccaaaagagcgctcagcagcagggggattccgcatagctgataaaaaatgtaaaacgcgtaagcacccagcatgacattggcgccataccccatattgaaaaaattcatggtgccgtacatcagggtgaagccaaacgcaatggttgcatagatactgcccgttatcagggagtttacgattacctgtaaaatcatttcaatatcacgtccttccgttgcccggccgcatttttataagaagcgctctctcagcctttgctccgtgccctcgtctacctgcggctcggcataggaaatggttcccgttttgagtaaatatacccggtctgcaattgtgagcattgcgcgcacgttctgctccacaatcaatacgctgaccccgcggtcttcacgggcgcccgcgattagctgcattgtctgctcgaccagctggggcgcaagcccgattgaaggctcgtccaccaaaataaattttgggttcatcatcaacccaatgcaaaagcccaccatctggcgttctccgccgctgagcttgccggctaccttgttccggtaagatttcagcttgggaaaccgctcgtataacgtttcgacgcgttccttcagggcctttctgtcgtccagcagcaccccgcccatttccaggttttcctggacagtaagattactgaacaccttgctgccttgagggatatagctgataccggctttcacgttttccgaggggctgcggccctggatggctttgccgttaaacaggatttcgccctcgctcggcttgagcataccgaaaacgcttttcagcacggtagactttccggaaccgttgggccctacgaggccgacgatttcagactccccgacagagagtgaaaccccgttcaaaaccagcttttcatggtagcctgcttttaccgattttagctccagcacagtaacgtccctcctgtctttttgaacgacgggtgcggatggcacgggctacgggccatccgcatccaataaaacggagacatttgttgtttacacggtaaggtgcagcatctcttccatttcttttaaatcctgttctttcttctgcgggaacaaatcccccacataccaagggaagaagaaatggatccagttatgtaaattcgttacatagtagcagtaggcgtccagcagctcgcggtactctttcttatccgcaatcaggtccagaacgtcgagaattttctgtgtgtcgtcccaaagctgctcaaagccgcatgtggacaggaagtttgcggacagcggcacggaatcgcggaagatagccttcatatgctccaaagtaaagctttcgttttcgcacatacggatttgtgaaaacagcatgtaagcgtttaactggcgcatgtcgccctctgcgaaaaccatgcaggtaaaagccgtgttccacaggccgcccatgttggagggcacgatacaatatttatataggcgaagcacttccttggagggctcgttttcaatggcggcgccgtgctccatcagcatatcgattacttttctgacttcagcattcatgtttaaaaactcctttcaaagctaccggtttgatttagtcttcttttacagtcaatacgcagtggataacctgctttgtgcgccagatggcgtcctttacacgcgtgccggcttcaatcagcttggggatgtcgcgctctactaccttaaaagcaaagtagccgggcatcttttcataagcttcgccccagttgaaggcaatatgcccgtttttgccgcccgcaaggccgttagggatattgtaagacatatgccctgttccaagctccgccaggtcgatacgggtgttgacaatcttgttgtcgcccaaatccggcaggtcgtccttcatatggcaccaggtgtacataacgccgccggtacacatggcgtggagctggataaacttgataggcatctgggagaggtaatagtcgtaaatccagcggttcgcgccgtcctcgttcggcatgcattccacactgatgttcagttcgggccaggttgcgataaagttcttggtctcattcataataaacgatccttcctttctgtattgccagcgtattccggcttgcaacatcatagtataattgtttcagaaataagtcaacagtttttgatttttttctgaaaatttagttgttcttacaaaaaaacgtctttttctttatcaattattccagtgcttttttcgatgaaataaatataaataagtttagagcgttggtgaatatagggataatatctaatatcgaaattgtaatttttcacatttatccatttttatggaaaaaataaccaatgtactgcgtgaaactttttgaaatttattttgaaaaaatttcagaaatattctgaaaaagtgttgacattttttgaatacgctgttaacatttcagtagacagaggaaatggcaaccgctgtgaaaacaaaattattactttaaggaggtaaatttatcatggcgaagaaattcattcccgaaccgttccgtattaaaatggtggaaaacatcaaaatgaccacgcgtgaagaacgcgagcagaaaatcaaggaagcctcttataacctgttccgcctgaggggagaggatgtgtatatcgacacactgaccgactccgggacgaatgcgatgagctccgaacaatggtccgctctgatgcgcggcgacgaggcttatgccggcgcgtcctcctattaccgtttgatggacgtctgcaaggaaacctttggttatgggtatttccagcctgtccaccagggacgcgctgcggaaaaggtattgttcccgacgatgctctgtaaagggaaatatgcaattgcaaaccttttctttgacacgacccgcgcccacgcggagctggctggtgcgcgctgcctggaatgcgttgttccggaagctggggacacggggcttcgcgtaccctttaagggcaatatggatattgcaaagatggaagcaaccatcaaagagcacggcgcggataaaatcggcctggttgtcatgaccatcaccaacaactccgccggcgggcagcccgtatctgtagaaaacatgcgccaggtttctgaggtctgtaaaaaatatgggattccgctttgcatcgatgcggcgcgttttgcggaaaacgcttatttctgtaaacgcgacgaggcggcttgcaaggatatgacgattgctgaaatagtcaaaaagaccttctcttacgcggatatgttcacaatgtccgcaaaaaaagacgcgattgtcaacatgggcggtattattggtattaaggacggggattccccgctgatactcaaggttaaggccaactgtatttcctttgaaggcttttatacctacggcggcctcaacgggcgcgacctggagtgcatagcgaccggattaaaagagggcatgaaagaagattacctgcgttaccgtattggtacgatggagtacataggaagcgcactggacgaccttggtattccataccaggcgcctgtcggcggccacggtattttcctggatgcggccaagttctatccgcagcttccctattatgagttccccggccaggtattgagcgtagagctttataaagaatgcggcctgcgcgcctgcgatatcggctcctatatgataggaaacgacccggacacaggagagcagctcaagagcctcaacgaattcacccgtatggcgattccgcggcgcgtctacacgcaggcgcactatgatttggtaatcgacgccatcaatgaggtttggaaaaaccgcgaaaatatcctgcatggctaccgcattacctgggagcctcccatcctccgccatttccaggcgtcgcttgaacccattaaataaataattccataaaaccttgacgcatataaaacagcgaggccgcgtttcccacaaaagggggcgcggcctcgctgtttttaaagccggaaatttagtttgtcctaaaatggagcgctatgattttataatttgtacggttagcgtgttatttccacccgccgcaattttttatgcgtggcatggacgcgggaaacaaatttatatttaaggcatacgagcagtttcctgcggcggccgccgattccattggatttattattagctttccggtataatgaataaaaaggttcagatgatggtatggcagaataaaatttataccggatttattaaaggctgggaatttttgcagcgcatgccttcttttcataaaaccgtttactttggcgttgccttgtgtgtgttataattattggcttaggcggttatgcggcctgaaagctaaaatgtacgacaaagcatggaaaaacctcagacagtcttgccggtttgctttttggggaattatccagagagatgaaagatgtatgtcttggaacgaaatgtagaggataaatttgtcctgcgggcatgaactgcagaaaaaagaggggaaaccatgaaaatttctatgaccctgcggtctgaaaaggtattatctatcgctttgacggcactgttcggcgtctttatcatcagccgcctgctggcttggaacggctgggccgatatgctggcggcagcaacgctgtttattttgtgccttatcctgctgttgcgctcgtttggatggtatgaaatttccggcaggggtgtttccgaatgtacgtggctgtcgagaaaacagttatcatggaatggattggcgtttgcggcggaggaggaggatacttaccggggctttccgctcaaacggtttgttttttccatgctcccaaaagcgaaggtaaaacgccggttcctgtttttgccgaaccgcagggttatctgtatgagctttattatgtctacggaaaagggcggggaacaatatgaacaggcaaaacgggcgttttacaggaattgcccggcggaactgattttggacaaaaacggttaaaaagcccttattatagggacgggcaaaccagcagggaatgtcataaccgcgccataagccgccccgcaggctggtgctgaaaaaattcagctttagagtgctgtaaaattattaaattttttagaaaacgcttgactctcacgcagcgtcatagtgtatgctcaaagcaagccaggggaggagagtatgatgaagacagttaaagaggtcagccgtatcagcggtgtgagcgtacgcacactgcattattacgacgaaatcgggctgcttgctcccagcgggataacagacgccgggtaccggctgtatgacgatacggcgcttgagcggctgtctcaaatcctgttttttcgggagctcgattttccgctcaaggaaatcaaggagattctcgacagcccgtcctttgaccgccgcgcggcgctttcaaggcaggtcgagctgcttcgcatgaagcgcgaccgtttggaacgcttaatacgcctggcccttggcgcacaggagaaaggaatgagctatatggatttaaaagcattcagtacagaacaaatcgaagcatataaaaaggaagcaaagaaaaagtggggcgctacgccgcagtggcaggcgtatgaaaaacaggcagagggaaaatccggacaggagcttcaaagtgcgcaggcgctcctcatgagccattttgaggaattttccaggctcagggacagggattacggcgacgatgcggtacagaagcaggtcgggctgctccggcggacgattaccgaaagcttctacccctgtacaaaggaggtgctttccgctcttggcgggatgtaccgtgaggacgaacggttccgtaagaatattgaccagtacggggaaggaaccgccggttttgtcagcagcgcaattgtgtactactgcgaaaaaaaccagtagaaaagaaaagcggcgccgttatgcatctgcacagcggcgccgctttccatatagaaggaggaatagcaatcatccggcttttttcacttttttgttccttatgacgataaccgccgcacagctcagggacaaaacgcagagggcgaaaaccgcggcagcaggcgactggtcgcctgttgcgacacccgggtctttgccttcaccggcgttctgtgtgggagcatctgtggggataaccggggcatctgtcggcgcgtccgtgggtacgtccgtgggtacgtccgtgggtgcgtccgtcggggcatccgtcggcgcgtccgtgggtgtgtctgtcggtgcgtccgtgggtgtgtccgtcggtgcgtccgtgggcgcgtccgtcgggtctgtaggttcctccgtgagcttccaggtataggtgattaccgtattgttatcttccgggtagttgtcgtcgtgcacaaacgatgagatgactccggcggcaaacgcgccgagctgcgcgcgaagctcattcgtcagaaggccttcctggccgtcctgcccgttaaccaggccttttaatatcgaaccgatatcgaacgacgcctccgctccgatggaaccgagaattatgtttacgtcgtccagcaaatctttcagtgtataattttccggtatataagcgtttacgccgtcgaagttgctgtagtcgccctccagcgcgccgttgattatcagcacaatcatattgagcgtatccttggtgttttcatttgcggcgttgagcaggggcgtgcggccgtcaagcgctaaaacagttttgtcgtttacgttgacgcccttcatacctaaaaatcccctgaggctgatttgcccggcgagcgttccagccgcggacgtaacctggtcaagcacgacgtttacgagccggtcgacaagcgagccgtcgaggagcgcgccgatagaagcggtaacccaggcttccggttctttgccgtcgctgccgtccagatgggtctgataggtgtaatttgcaaggtcaagcagcgtttttgcctgtgttccgtcgtcataaacggtcatggatgtcagggcttctacaaggtttttcacaatttcatcgagagcttcagggttttgaagcatcccgtctgccgtttcaaaggtatagccgagcgcctcattaagcgcctggaccggaatatcgattttgtttgcgttgtctcccgcgccgtattccacgcggacattcggggcgctgtaataaatattgagcttttcattcgggtcaggcgcgtccggcagcagaaggggaaggcccacgcttaacagcttctcaatagtaaggtctttgattggcagggaatcgccggccaaatcgccgataagctgttccagcgccttcttggagccgccctgttcaataacctgggcatagagcgtatgaaggaacccgttcgcggctgtttcaagcatatcgtttgagaaaccgtgctgtttgccatacgcggtaatatcgtcaatcgtctgttcttcaccggtcagcgggttggtaaaggtaatcgggccggcgtttgaaagcgtacggatgccggtgttctccgttaccgtgccgttttcgacggtgcgcgtaatatcgacccttctggcgggggagggatatgtcaccagggagcctgtctcgatatcataaagcgtgttgccctgcgctgtcgtgacagatgcaatatcgtttgcgtgcatatggccggtgaaaatatactgcatgcccgcgtccgcaaactcctgtgaaagccgctcgtaaccattgacgaggtattccggaagaacatccggctccatgctgaaatgcggtaccatgccgtggtgctgcataccaatcaccgtgtctccgcgaagctttgcttcttccacctggccgagcacccatgccttgaggctttcgctgatagccccgcttgtttcgtgttcatccttgccggaatcagtattgtcgctgctgtaccggccgctgtccattacaataaacgtaaagccgtccttcggccgggccgcgtaggaaagctgtccggactgttctccctgcgggggcgtgtagcgggcaattacgctgctgtcctgataggtcacatttgcgtacgcgtcaataaaatcctgcggctgtgtgcgctctgcaggtacggcggttccatcgccggtattaaaattcattgcgttggagtttcggacgtcgtggtttccgtttgtcacgtaaacatggagatttggcaaatcctttttcagcacctcaagcttctgagccagcgcgcggtgcccttccagctcgccgtccttcgtcaggtcgccgctgattagcaggacgtccggctgctcctccctgactgtatcgagcattttatcaaggattgcgctgctttcggtgaacattttccggtcgctgttgagatgagttttgtagtctgcggtgtccttaatcatgtcgggcggcagataatgcgtgtctgacatggcggcgattttaatcgtattatccgctttttcagtcaaagccatcgtgcttgccccggcagccatcaggacggccgcgcaggtcaaaacggcaacggctttttttaagctgttgttcgctttcatttttatacctctttttactcatatttgcgttattttcgcagttttattataaatgggcaatgtaaaaggggaaaatgggcggggtaaaaagaaagcaaaaagattgtaagaacataccaaagaataaatagaaaaaaactgttgacactgtaacaatgttatgttacagtgaaagcaacaaataaaacattgttacacgggaggctatgaggtgaacctgatatcaaaaaaggatttgcttgctatgactggaatttcatacgggcagctttaccgctggaagcgggaaaggctgattccagaggaatggtttattaaacagccgtcctataccggccaggaaacatttttgccgcgggaacagattctcagccgtatccggtctattctggagctgaaggacaggtattccattgaagaaatggcgaaaattttttcaccggagacagcgccggccgggatagcgccgcaggagcttgttctgtttgaggaaatagacaaaaattttttaaagcttctgcccagggcttacccaaaggagcagtatgaatttttggatttggtcttttttgcggcgttgtctgcatgtattggcaaaaatgggtttaccccgcaggacgcggcagagcttgtaagcagggcaaacgcaacggtgtttacgctgcacagtgtggaccgggtgctggtgctttttgcctgcggcggggaattccatgtggcgcttggcagggacgaacggcctgttatgtttgacacagggcttgaaattattgaaatgattcatttgaaccagacagcggatcaattgaaattacaccacaaggaccggttcccggtttgaatttggaaggagctatcgttatgcaggattttaatttagacggcgtcagcagtatttcgggcggggtatttagaaacctcgcgattgacggggtaggaaaatgcaccggtaatatcaaggcggagtctgttaaaatagacgggacgtttcactgcagcggcgccgtagaaaccggcctgttccgctgtgacggcgttgcggaatttaaagcggatatccgggccaaggagcttatcatcgacggtgttgtaagcctgaagggggaaatgaaattagaggcggaacggattgaatgcgacggcgttatcaagacggacggcgaaatttccgccgattttataaaggcccagggatgcatccgtgcaaaggagctggtcggcgacagtatttgcatttattcccacccgcatcatctcatgtttttgttcaaccggcaggtatcacgcgtagatttgattgaagcgacatctatcgagataaacggcgtacaggcacatgcggtaaacggcacgcacattaaaatagggccgcattgtaaaatcgatacggtcgactgctccggcacgctgtttatcgacccgacctccatggttgggagcgttacaggaaattatacgatgcagcggtagctgtttagaggccggtgcaataaaacccgggaaaggcttgtcgaaaaatgccgcttatgatataataaggtatattttcctggttggattactcacaggggggcggcggctcatgaaagcgttatgtatagattacgagtactattttttcccggacggatgtaatagcgcggaggagtttgtccggtactgcggccagcacagcccggaatttattatgctggaacggctcaatgccgaaaactgtgtcgcgccttattttatacaggatgaaaaaagaaaacaggtttatttgaacagccgcgcaataaaggaatttacagaggaagaaattgaaatcctgccgcaggaggagtacgacaggcggctcaggcaggcggtcaaaacgtgctgcttgacatgtgaaagctatgaagaggactgcgcaggcgataatcttgaaggccacagggataagctgtcgcttgacgggaactgcgatttttatacaaaatcggcgcgggcgcgttccaaaaaaagatttttttaacaaggcaaggccggcggtatgatacataccgccggccttttcagaatttcttgtatgaagcgcgccggtcagatgttgaagcttggcggctggctcttcgcggggtcaaaattctggccgccgttcggggacggggtggagaggtcgaagtaaatgcgggaatccctggttgcgccccagtctttctgcgaaccggaatcctgtatcttgttgaacgcctcacggaacatcgtattgtgcgcttcctcgcggttgagcaggaaatcaatcatctcgcgcacacccttgtcgtcaatctggcggtaaaggttctggtatacgaccttcgcgcgctgctcggacgcaatgtccgacaaaatatccgcggctgcgtctcccgtttcgtttacataggccgcggtccagaggtaaccggatgcatttgtaagcatcggcgtcaggccgcttaaaacgtgcgcctccacagtgccgaccgtcgcgtttttcgcatccggctcagaaccgtttaaaaggtttaccgcggttgccaccatctccagatggcaaagctcctccgcggcaatatccagaaacaaatccttgatttcaggattcttgatgcgcatactctgcgcgagatattgcagcgcggatttaagttctccctgcgggccgccgagctgctcctgcaaaagcgcggcatagttcgggtttgtgcggtctacgcgaacgtcctgcagcagctttttttcatgtttaaacataatagataaccacctttcttctggtatatctttaatatgtttcgtttgtaaaaagatatacggaaaaaggaggacaaaaaacaaaagagggacggtttcccgtccctctcaaaaaacagcaggcaaatcaaacgttggcttcgatatactccaccaggttgccgacggttttaatattctcaatctcctcgtcgggaacctcaatttcaaattcgtcttcaatcgacatgagcaggtcgacgacgtcgagcgaatcggctccgaggtcctcctgaatcgttgtttccgctgtaatagaatcctcttccacatcgaactgttcagcaaggattgcctttaccttttccagtaccataatgtattcctccataatttttattttgccgccagcagatgattgtattgtggacaaaatcatgctttttatgctacaataacaccacgcacatttccgcttttttcgaatttcgaaccggcataagattagtacaaaaacatattattagtaaaggtagcctttgtcaataacaaaattgtaacttttcggcaaaaacggatttatttttataatctaaccaaattttaggtggatgggagtgggtttatcatgaaaaagaaaacgtacgcggtcatcggccatccgattgggcatacgatgtccccgtttatccacaacaggctgtttgagcttgccggaatcgacgcggaatactccgttttggacattgcgcccgaggacctgggggcacggtttaaagaggagctgaaaatgctcgacggctttaatatcacaatcccgcacaagcagcacatcatcgggtacctggacgggctcgacaaaaaagcagggctgtacggaagcgtgaataccgtgaagaacggggagcagtccatcggctacacgaccgacccggacggctttttgaaggcgcttgaggcggctggaatccctcttaggggcagggtggtaatcctgggtacggggggagtggcgcgcactatggcgtatgaggcggcaaaggccggctgcaacctgaccattgccgtgcgccctgacgatttgcccgctgtcgcctgccttgccggggaattgagcattaatgtctttaatgcgcatgtagacacctgcgtactcgaccggattgagggcggtatcgatttactaatcaacgcgacgcccgtgggtatgtacccgaatacagacgcatgccctgtcggcgatgaaattatcaaaaccagcaaatatattttcgacgcggtctacaacccgctcgacacgcagctgttaaaaaaagcggaggcgtttggtgtgaaggcactcggcggtatttccatgctcgtctggcaggcggtcgtttcccatgaaatctggaacggctcagtttatgacgcaggggatatcggaaagctctgccaggacagcgcgcaggagcttatacgcacgttccaaaaataagaagctataacaaaggaatgcaaaacgtatgccacagtacaggaatgtcgtcctgtgcggctttatgggcagcgggaaaacaaccgtcggcaggctgcttgccaaaaggacgggcctgccctttgtcgatatggacgattatatagaagaaaaggcgggcatggccgtaagtgaaattttcaaacggcacggggaagcctatttccgtgatttggagcatgaggcttccaaagagcttgcaagcagggacggctgcatcatcagcgcgggcggaggcacgcttgtgtaccagcggaatgtcggagtcctgagcgaaagctgccggattgtcctgctcgacgcgccgctcgaggtgattaagcgccgcctgaaaaacgacaaaaagcgcccgctcttgcagcgcccggacagggacgaggcgatgcgggagctatacgcaaagcggatgcccctgtaccgcggcgcggcgcacctgacggtaaacgcggcgcagtcgccgtataaaaccgcgcgggaaatcgcaaaggcgcttgcgcttggttcgcgggcaaaaaaccgtaaataaaagggaaaagcggcggagcattacggttccgccgcttttatttatgcggggcgctgtgcgccctttattttatggcttgtagtacttgtcgagaaatttgtttacgtcatcgcttaagccggtttttctataggtgcgctcctccttggagccgtcctcttttacataggagaatcgtgcatcccatagaatcaaatcggtatattcttttaacgtgcaattttttacactgctttccaatttgcgcatatctgcgaggctttctttactgtctactgtaattttgaattcatctaagaattcattgttgtgagaatatgggccaatcatcaattcgccggaaaccgcttcctcctcaggccctacgccgttttggtccaggtaaaacgcaaatgcggataaaaaaacacgcagcctaaaaatatgcaggtaaaaagaattaacagcccgcgcgtgcttagcctgcggtgtttcattggccttcgcctccctctttcggcggcttgtagtacttgtcgagaaatttgtttatgtccttgtttaaatccgatttgcggtaggtgcgctgttccttcgtaccgtccgctttgatataggtaaatgtcccttcccagactatcaaacttgtgtattcctttagtgtcatatttttcacacttttttccagagcgcgcaggtcggctatcccttgttggctgtcaatttttacacaaaattcttcggtgaattcctcttgatataaatacgggccatttaaataaaataccgcggaaaccgcgtcctcctcaggccctacgccgttttggtccaggtaaaatgcaaacgcggataaaaaaaacacgcagcctaaaaatatgcaggtaaaaagaattaacagtccgcgcgtgcttagcctgcggtgtttcatctgccgcactcctttctatattaagcgttttgctaatactatataaagtctcttacacttaagaaaaaggggcgctgccgcgcccctttcgtcttatggcttgtaatacttgtcgaggaacttatcaacgtccttactcacacctgttttccggtaggtgcgttcttccttagagccgtcctcttttacataggtaaactccgcttcccatactatcatatcagtatattccttcaaggtaatattttttacacagctctccaattcacgcaaatcagcaagactttgtttgttgccaatattcaccttaaattcatcagcatatacatcattatacgagtaagttctcaaacttaaagttgccgaaatcgcgtcttcctttggcttaacgccgctttccgtcagaccgatgactgccaccgttaaaataaatacacagcttaggaagatacacgtcgccagaatcagcatattccttgtgttccatttgattttcttgagcttccattttttcatattcaatttgtcccatctctttcacacatacgcctggcttttgcagtgtcccatcttatcttacctttccattatactcagaaatggcaagcttttcaactgcattaaataaaagttatccctccggtacggcgggcacctggtacggctggggtgtagcgtccccgctgaacacgacctcgtactgcatgacggggttcccctgtaaatcgaaggtcaagtattcgtcggcaatttcatagccgatggaacggttcaaggggcttgcccccgcgtcccacaatgccgcgccgagctggctgcgcgtggcggcggtatcgaccgttaaatcgagctgcgcgtagcggccgcgtttaaaggtgttgtaggcgcacacctcgccgctgtccgcgcgcacccacacaacgcaggagtcgtccgtcttgaccccgtttaaataataggcgtactccactacataaacgccgttctggctgccgtagtagctgcgctccagctggtaaaccgtttgattttgcccgaacagcgcgtcaaggtacgcgccggcgctttccagcgccgcctgttctgttataatgtcctccggctccagctcgcccgcataggcggtttcccacttgaagccgcagaacgtgtttgtgtcgtacaggtagatgtattcgttgccctgtgcgtcggtgtaaatatcgtaggtgccgtaggcgtctggtcgggagacaagcggcgtgtcgctctggttgaaggttttttcatactccacactcagcgcgctttgtcccggcagcgtgatttgctttgccgccgcctctttgccgccgtccacatacatgccaaagccgccctgctcaatttcagcggaattgacgtcctgcgcaagggcggacacgcccgaaatgacaaccagcgcgcccaaaatgacggctgtgcacaatagctttttcttgtttttcattattgtcccctcctttaggtcagcttttggttggtgtcgccaatcgcgtatttgtcgccggtgctcgcccaataatcggcgtattccacacaggtgcctacgcttacgccgtcgtccgcgcgcgtgatgaagcactgtacccaggtgctagctagggatgttcccggcgcctcacggaagccaatggcatagtgcgcgcccttgttgtaggccgcctttacgaggttgttcgacgcgctcgtcgggttgccgttcgtgtcgtttcccgtataggaaccggtcgagataaatacacgcatggaggaaagaccattagttgcaaggccatttatacctgcaattgtaatcgatccgttggttgcacctgtgcttgtattaaaatataaattcccagcggctcccctacctctatgtacccaaatatcgtcgccgagcatattggtcagcgcgttgtctgcgctggtgtttacataggaataggcgctgtagcccatcgcatttgccgaatttttaaacgcggtatttgcggaggtggaatcatagcccgtgtagctgaacgagtagatgtccgcgtcgcccttcgacactttctcaaacgcccacctggaataattgccgttgctcgaggagctcatgataacgctgttcgtggaggtgttgtctatcatgtaattcgagccgtttttgatgttatacgtaccatccgaaagcctgaccacagaaaactgctggtaggccgcgtttgagtccgtataaatatcgacgttcccgctggagatgtcgagcacgcggttcgccgaggaacagcgcgcgacaaacttgtagttgtcgcccgggtgcagcacgcggaactgctggttcttaccgccgttgtaggggtatgtaataacgtcggtaaagtttgcgtccacaccgctttttacgtccatgtaacggcctgagcctacattcctgagatagtagtactcgcccgcgcggatgcctgcggcgtccgccgcgtgccccgttacggcaaagacggttgccatcactgccaaaactaaggcaaatgatattaattttttacttctcataaattttcactcctttattttagttgtatgaaaagtgcaataaaattataatttatatgttgaatattgtcaataaaaggagcttgtgaaatggaaaaatttcacaaactccttaaaaaataactattttattttcttgtggcgcatattactctatcacatactcctgaacataagcatacagccgttcgtcgacgaccgcctccaccgatatgccgccgtcggtatactcctcatggagcagtgtgccctgctgcctcagctttgctgtcagcggcgcctgcccgaacggcagaagaagcctgacacgccgcatttttacaggcaggttgttttccacagcctggagcaggctgtccacgccctttcccgtttttgcgctgatgcgcacagcgctgcctatcatcggtacggtgtcaagcccgcttaccaaatcgcatttgttcagtacggggataatcggcctgtcctcacagcccagctcgcggagcagctcgctggttacggtcaggtgtacctgcgcctcttcgctcgaagcgtcgcagacatttaaaataatatcggcctgcgccgcctcttccagcgtggatttaaaggcgttgaccagatggtggggcaggcggcgtaccaggccgaccgtatcggtcagcatgacgcttacgccgtttggcagctttaaggcgcgcgaagtcgggtcgagtgttgcgaaaagctggtcctgcgcaagcacgcccgcgtctgtcaggtagttcatcagcgtcgatttaccggcgttcgtatagccgacgattgcaaccgtaatcacgccgtccttttcgcggcggcgcttgagctggccgcggtgcttttctacctcggctaactgctcctgaagggtttccatgcgcctgcggatatggcgcttgtctgtttcaagctttgtttcacccgggcccctcgtgccgatgccgccgcccaggcgcgacatctcggcgcccttgccggtcaggcgcggcagcatgtatttgagctgcgcaagctcaacctgcagcttgccctcctttgaacgcgcgcgctgcgcgaatatatcaaggataagcattgtgcggtcaatgacgcacacgtccgtttccttctcaatattgcggatttgcgtgggggaaagctccctgtcaaaaataatcaggtcgatttcgtcgtttttgcaatattcggcaatctcctgtaaacgcccggagccgacacaggttgcgacgtccggcttatcttttttctgcgttacgctcgtaactgtttcggcgcccgcgctctgcgcaagctcgaacagctcgctcagtgaagcctgcgcgtcgtactcgcccgtatcgacagacacgagcagcgcgcgctgcggtttgatttcattttcaaaaatttccataggtttctccattgtcaataatttatagaagcatccggccgcgccggatgctttcactgtaccacttcagggcgcgcaggtcaaccgcgcggcggggaaaaaactgtttccattatgcccgatttgtgatagaataagcactatagcaaaaaccgacatgctttgcgccgcttttcatacggcgcgctgctattgaaaggttgtaacgcaggtgaaacagcaatacgacgtaatcattgcgggtacgggcgcggccggcctttacgcggccttacagtttgacagggacgtaagcgtccttttgatttccaagcgggagctgccgctttccaacagctcgctcgcacagggcggcgtggccgcggtgctcgaccaggggcacgacaattttaagctgcatatcgcggatactttaatcgcgggcaaatataaaaataacctggcggcaattgaggtgctcgtcaccgaagggccaaaggacgttttaaggctcagggagcttggggtcgattttgacagggacgagaagggccatttgatgatgacgcttgaggcggggcattcccgccacaggattgtccatcataaggacagcaccggcaaggcgattaccgacacgctcattgaagcggtcaaagagcggggcaacgccgatattatggaaaacaccatgctgttttccctgcaaaaggcgcgcagcggcttttacgccgggctgatgcgcgacggctgcgtggaatggattggcgcgcgctattgcatcctggcgaccggcggggtcggcagggtgtatgaatatacgacaaattccgccatcgctacgggcgacggcattacgcttgcctatgagcttggtgcgaatatcaggcatttgagccgcatccagtttcatccgacggcgtttgcggcggataaggaccgcgaacggttcctaatcagcgaggcggtgcgcggcgagggcgccgtgctcctcaactgtaacggcgagcgcttcgcgcacaagtacgacgagcggggggagctcgctccgcgcgacgtggtttcaaacgccatcatgcaggaagcaaaggcgacgcggagcgaacggttttatctcgatattacgcacaaagacccggagttcgtaaaaaaccggtttccaatgatttacgcgcgctgcctcgaggaagggattgacattaccaaagacaggatacctgtctttccgtgccagcactacctgatgggcgggatagacgtcgatttgtttgcgcgtacctcaatcgacaggctgtacgcggcgggcgaatgctcgcacacgggcgtgcacggcgcaaaccgcttggcgagcaattcgcttttggaggcgctcgtgttttcacgcagggcggcctgcgatattatggaaaagctgaaagccggccaggacgcgccgcttggtgacgcgccgcttggtgacgcgccttccgtacccagcacagagggggaacccctgccgcacggactgcgcacagaaatccgccggattatgcagcatacgcactttgtgctgccctctccggaaagcgtaccaggggggctcagccgcacgcgggaaatcctggaacaggtaaagacgggcggatacgcgctcaatcccgattttatagaggcgaaaagccttgcgacggtcgcgtgccttatcctggaggatgttctccggaataacggagaagaagacaagagggacagaaaggaaatataaatatggttaatccgatttacatagacaatttgattaaaacggcgctgcttgaggatatcaattacctcgacacgacgacggactgcctcatcccgcaggagcagcagggaagcgcgcgctttcttgcaaaggcggagggcgtgctgtgcggcatggacgtcgccctgcgtgtgtttgagctgttgcagccggattttaaggcggaggttttcttccacgacggcgatgctgttaaaaaaggcgacgttttagcacgggtaagcggaaagatgcgcacgctgctcaagggagagcgtacggcgctcaacctgctgcagcatatgagcgggattgcaaccgcgacaagcggggccgttaagctcgtagaaggcacgcgcgcctcaattgcggatacgcgcaagaccctgcccgggctgcgcccgctccagaaatacgccgttacggtaggaggcgggaaaaaccaccgctataacctgtctgacgcggcgatgctcaaggacaaccatatcgacgcgtgcggcggcattgaaaacgcggtcggcgcgctcaaaggaaagctgggccatatggtgaaaacggaggtcgaagtcaggagcctcggcgaactggaggaagcgttagctgcgggggccgacgtaattatgctagacaacatgagcccggagcttatgatgcaggcggttgaaatcacaggcgggcgtgccctgcttgaggcgtcaggcggcatcacggaggagacgctcaggcaggtagcgcagtcgggagtggatatcatatccatcggcgcgctgacgcattcggtaaaggcgttcgatatttcgatgaaaatcgaatgaaataatgtaaatacaacaatcgcatcgtcagaccatgattatgggaatataaccaactctttcattgaaaatttaggctggaaatcatttctcctggagagcaggtatggaagtctaaaaacttatatgacaataaacagcttgtagaattataccctcctgtgtcaggcaaatatacaattaagattagcaaaattggaacttttagtgataatataaagtatggtctatcttattatcagtcctagaggtggttgctgtgaaaaaagcattacttttactttttatagcttttatcttgttcgcctcttcctgtacggcgcggacgcctgtttcagcggacgctccgctcggcacacaggcaaaaattgagcagttcattaattttgcgcatatcagccgggaggattatgacaacgtcgtaaaggagaaacagctgctttttcttggaaaatcaggcggatactctatctgcgaatatgtaaagggcggggatttgcgcattgtcgatgaaaaaattggagattacacttttcgcagcggcttttcgcacagcccatatccgcttgggtattacgctatcggggaaaaagaggtttataccctgaagcaggcatatgatgccggggtaatagatttaaatgaagtcgccgggtttgcccccacagctccggcaaatgaaacagaataaacaacagataatagagccggcgcgggaattaaatcccgcgccggctttttatctatttcggtatatccacatgagcgggcttgttttatccagccgttgaaacgagatacagcgcaagcattacgagtgaggaaattacgcccagcacaagcacgatagtcggcaggataaaccacactgccttcggctttgctttccctttccggcggaaaacagcccttgtaataaaatacgcaatcaggccggcggtgccgagcaggacgagcccggcagaaaagcaaaaccagacaatcaaaacgagcacgattgccgctatccctaaaaacatatttcccctcccataatatgttgataaagctctttcatatcaacggaaggccataaccgcccagtcagcaagcggcctccagatatcggggaatacgcgcccaattaaatcataggcctgcgccttcgttacgttgataatgtccccagggtccggcacctggatggtttctatgccgtttggcagtacgccgattgcaaccggcgcgctgcaccatccgccaacggcgatatgcgtgccagctgcaacgccgcccacgctcgacacgcccgcggcaaccccgccaagggcaaacacgcctgcggccgttccggcaattgccacaatgccagctgcaacgcctcccattgcaaacaggccgagggaaatggccgccatggcaaataagccgagcgcgacggcgccgaatgaaacaagcccgagggaaaccacgccgattgaaataatccccttgctaatcatcccgactgctacaaagcctttcgccttataaagcccgctgcctatattgacatgcacaagcggcatgccgaataccgtccttttgcttttgtattcataatgaaagcgggccgtcccctgcccgtttttttgaacctgcgcctcatccgccggctgcggcggtgcgggtgcatccgtaaccaggctgtcgaccgaaacggaaaaaaagccgctgatggtcatcaggttgagcatatcggggtatgacgtcccgttttcccatttggaaattgtctgtctcgatacgcccagcctctcgccaagctcttcctgcgacatgcccgcctgcttgcgcaggcgctggagctcatattgaaatttcatagcggttgtctcctgttttcttagttttggtatggtcaaagtatagcagaaccgcgttctcctgtaaaacaaagactgtttccttttatgacaacaactgttgtcatcggcttatataagcggttttttatcgttttttcctgtgaaaacaaattttaatgcaatcttaattccatggaacggaagtttatacttattttataataaggctgttatgctaaagccagaaaaggagggaacgttatgacaaccaaaatttatgaaacgaacaacgtccattatggtactccgccttatcagaaggaaagaaaacacggcatgaagatagtcaatatagagcggctcggcgaaaagcacccgtattccttcctgtttttgtcttgcgtgcttggcccaattattattttattagctgtgggcgttgttatttttgctgctgcgctgcccgttgcttttacgggcggcctgctatagagaaacaatttttctgacaagaaaggaaatcaaaatgaaaccggtcatatttaaaggttccgcggcggcgcttgttacgccgatgaacgaggattattccattaattacgatgagatgcggcggcttatcgaatttcacctggaaagcgggacggacgccctcgtcgtggcgggcaccaccggggaatccgcaacgcttaccgacgaggagcatcttgcactgattgaattttgcgtcgaaaaagtaagaggcagaattcccgtcatcgcgggagcagggagcaacaacacggcgcacgcgtcctatttatcgaaggaagcgcagcgccgcggcgcggacgcgctgctgcttgtcaccccttactataataaaacgtcgcagaaggggctttacctgcattttgaggcatgcgcgaaggcggtggaccttccgataatcctttataacgtacccacgcgcacgggaatgaatattctgccggaaacttatttgaagctgtcacggattgataatattgtggcggccaaggaggcaagcgggaatttttctcagatggccaaaatagcatccttatgcggagacgatttgaccatttattccggaaacgacgaccagataacatcggcgctcgcaattggagcaaagggcgtcatttccgtgctcgcaaacctcgtacccgcgcagacgcacgaaatgtgccaaagctattttgacgggaacacctcccgcagcgatacactccagcttaagtatttggagctcattgaaaacctttttagcgacgtcagcccaatcccggtcaagcaggcgcttgaattcatgggctaccatgtggggaaatgcaggctgccgctttgcgaaatggacagtgcgcccgcggaacggctgcttggctgcctcaaacggtacgggcttgctgaaaaagaggaatgccccgtcggcaccgttacggtcagccgtccggcgtatacgcttctctggaggaaaaaccactaatcacagcaggtcggaatctttatactttctttatacacaggcacaatttattaacaccgtttttattaaagcggtgttattctttacccgtaaggaggggttttaatgaattatatcgtagggatattcggcgcctgcgccataggcttgctgatatactatgtaatcattttaatgcggggtgataaacaatgacaaacacgattttgcaataccttttttatctcgtcattcttgtcgtgcttgcaatcccgctcggggcgtacataggaaaggtcatgaacggggaaaagacgtttttatcgaggatattcgtcccatgtgaaaaagcggtttacagggtgatgcatgtcaagagcgatgagcagatgacctggaaaaagtatgcggcctgcgtactgcttttttctggcgtgggccttttgcttttattcctgctgcagcttttgcagggatttcttcccggcaacccgcagggacttcccggcgtgccgtgggatttgtcgttcaacacggcggtaagctttatcaccaacacgaactggcaggcgtacagcggtgaatcgaccttaagctacctgacacaggcgcttgggcttaccgtacaaaactttgtgtcggccgcaacgggcatcgcggtgctgtttgcgctgattcgcgggctgattaaagttaagacggacggccttggaagcttctgggtggatatgacgaggattatcatccgcatcctgattcccttaaacctgattatcgcgctgtgccttgtaggcggcggcgttatacagaacttaaagcccgccgagacggtttccctcgtcgaacccattgcggtgagcgcggacggcgaaattattgaaaacgccgtcatcgattcggaagccaacacggtaacggtagacgggaaaaccgtcgacggggcgcagattgtaaccgagcagttcgtcccgatgggtccgggagcaagccagattgcaatcaaacagaccggtacgaacggcggcggctatatgggggtaaactccgcgcacccgcttgagaacccgaacccctttaccaatatacttgaaatgatttcgctgctgctgattccagctgcactgtgctttacatttggacgcaacgtgaaaaataaaaagcagggaattgctatctttatggcgatgttcatctgcttggtgctcgcgctcggcgcggtcgccgtaagcgaacagatggcgactccacagcttgcgcaggacggtgtgaatgttgcagtggatggccaggcgggaggcaatatggaaggcaaggaaacgcgcttcggcattgccgcctcctccacatgggcggtatacacgaccgccgcctcaaacggctcggtcaactcaatgcacgacagctacacgccgctcggcggcatggtaccgatgctcctgatgcagctcggtgaggttatcttcggcggtaccggctgcgggctgtatgggatgcttgcctttgcaatcctgacggtctttattgcggggctgatggttggccgtacgcctgaattcttaggcaagaaaatcgagccctacgaaatgaaatggtcagtcgtcgtctgccttgcgacgccggttgccatcttaatcggcagtggcatcgcggcggtgttcccgggcattatggacagcttgaacaacagcggcgcgcacggcttctcagaaatgctgtacgcgtactcttccgccggaggaaataacggctccgcgtttgcgggcttcaacgcaaacacggtattcttgaacctgtcgctcggccttgtgatgctgtttgtaaggttcgtcccgattatcggcacgctcgcaattgctggcagccttgcaaagaagaaaaaggtcgccgttacggcgggcacgctctcaaccacaaacccgatgtttgtgttcctgctgattttcatcgtactgctggtcggcgcgctgagcttcttcccggcgctcgcacttgggccgattgccgaattcttcggcagcattgcataaggaggcgttactcatggctgcgaaaactaaaaatgctttggcggacaaaaaaatggtcgcccgggcggtgaaggattcttttataaagctgagcccgaaaacgcaggcgaaaaatccggtgatgctgcttgtatatatctcggcaattctgacgacagcgctctttatcgtatcgctgttcggcataaaggacgcgccggcggtctatacgcttgcaattgcaattgtactttggtttacggtactgtttgcaaattttgcggaagctatcgcggagggcaggggaaaggcgcaggccgattccctgcgcgccgcaaaaaaggacgtggaggcgcatatgattacgtcgccctccgataaggaaaacgtgacggtaatttcctccgcgagcttaaaaaagggcgatatcgtaattgtccgcgcgggtgagcaaatccccgcggacggcgaggtcatagaaggcgcggcctctgttgatgaaagcgccattacaggggaatccgccccggtcatccgtgaaagcggcggcgacaggagcgctgttacaggcggcaccaccgtactgtccgactggattgtcatagaggtcacgagcgaggcgggcgagagcttccttgataagatgattgccatggtagagggcgcggcgcgcaagaagacgccgaacgagatagcgctccagattttcctgattgcgctgtccattatctttattcttgtaaccgtatcgctttatacctattccatcttttccgcacagcaggcgggcatcgataacccgacctccgttaccacgctggtcgccctgcttgtatgccttgcgcctacgaccattggcgcgctgctctccgccatcggtattgcgggcatgagcaggctcaaccaggcaaacgtactggctatgagcggccgcgccattgaggcggcgggcgacgtcgatatcctgatgctcgacaaaacgggcaccattacgctgggcaaccggcaggcctgcgactttatcccggtggacgggacctcccccggggagctcgccgacgcggcgcagctttcctcccttgccgacgaaacgccggagggccggagcgtcgtcgtacttgcaaaggagcggttcaacctgcgcggcaggacgcttgaagacaaaaacatgcagttcatcccgtttacggcaaagacccgcatgagcggcgtcaactttaacggcagtgaaatccgcaagggcgccgcggacgccgtcaaggaatatgtccttgcgggaaacggaagctacagcggggaatgcgatgaagcggtcaaacgtatttcgaaccagggcggtacgccgcttgtcgtcgcgaaaaaccacaaaatccttggagttatccatttgaaggatatcatcaagcagggcgtaaaggaaaagttctccgacctgcgcaaaatgggcatcaagaccattatgattacgggcgacaacccactgacggcagccgcaattgcggctgaggcaggcgtggacgatttcctcgcggaggcgacgcccgagggaaagctcaagatgattcgtgatttacaggcgaagggacacctcgtagcaatgacgggcgacggcaccaacgacgcgccggcgcttgcgcaggcggacgttgccgttgcgatgaacagcggcacacaggccgcaaaggaagcgggcaacatggtcgatctcgattcgtccccgacaaagcttatcgacattgtgcgtataggcaaacagctgttaatgacgcgcggcagcctgacgaccttttccattgcaaacgacgtggcaaaatatttcgcaatcatcccggcgcttttcatggggctttatcccggcctttcggcgctcaatatcatggggctgcattcccccttaagcgccgttttgtcggctatcatatacaacgcgctgattatcgtcgcgttgattccgctggcgctcaagggtgtaaaataccgcgaggtttcggcaggcaagcttttatcgagaaacctgcttgtctatggcctgggcgggcttgccgcaccgtttgttttcattaaattaatagacctgctgctcgtcgcgtttggcgtggcgtaaatgagggggcggcaaatgcgtttttaaataggaggtacctgacatgaaaactttaaaatctattttcccgcgggcagcgctgtttgtgctgatttttacagtcgtctgcggccttgtgtataccgctgtggtcacggggcttgcgcagttgatttttccgcaccaggcaaacggcagtatcatagaggtggacgggaagaaatacggctgcgagctgctcggacagcagtacacggacgacgcacatatgtggggccgcatcatgaacattgacgtatccacttatcaggacaaagacggaaaaaccctgatgtatgcctccccgtcgaatctgagcccggcaagcgaggagtataagcggcttgtctcagagcgtgtggaaaagcttaaaaaagcaaaccccgggatggacggcgcaccggtcccggttgacctcgttacctgctcaggcagtggccttgaccccgatatttcaccggctgcggcggagtaccaggtggaaagaatcgcaaaggccagcggtttgcccgcggatgatgtacgcgcaattgttgaaaaatgtacaaacggcaggtttcttggcctgtttggtgaggaaacagtaaacgtgctgagggtcaatttgatgctcgacgggattttaaaataaaagttcagttgcagaaacggctagaaatacagccgtttctgctttcttggcttttcaaggcgtaaaaaggaggctttcaaaatgcagaaaaagcataccgcctggaccggacgaatggacctcatggatgcgctttccgctgaaggcagggaaaagcagctcttaaaccttgtttacgggttaagcggggaatcggctttgaagccgcaggtttatccgtctgacgggcgtatcctctgggttttctatgagcattcctgctataccacacaggcgcttttcgacgaatatggtacggcgatggccaccgtttcccggaagtacccggtttcggtttatgggaacatcgacggctatgaaagcggggagcttttggcaagcttgattcaggatgaaatggccgtacagctaatcaaacgcaacgtatcggcggaggattttgatgagatttctgatatctgtttaaaaattatcttcccaactgagacggagcaaaaggaatttgccgtgctgattcaaaatatggattgccagaagccctatcttgcaatgcgcaggacgccctttacggagcaggcgttttcaggctgcccgcagctaagcggcgatacctgcttccgctatcttttgctgggggagcgggatgggcaaaattatcttgacagcctgccggtcgccctcaaaaaagacctgtggcttttgttcctgcgcgataaactaagcccattggagttcgacggcgcactggacgctttacagaagggtgaatgtgccgcctttccgtgggagctttccctgcatcttgcgctcagcgaggagcaaattaagattagctatgagcaaggcggctttcaggtgtttgaccgaaacggcaagaggctttattataactatgaaaatgtgtgctgtgcggaaaagctctttttgaagctcttgtttccgcgggagcccggccgggaaaaaatcaatcggcaggtttaaatcacgcaatcatggaaaataccgcatttgcctgttataataaatactagaatacggacgggaggtgcaaaggttggacgaatacaggacggaccctgaaaagctgctgcaaaagattaagaaggaaaacgggacgcccggcagggggcatctgaaaatattctttggctacgccgcgggcgtagggaaaacgtatgctatgctaaaggccgcgcacgcggcgaaacggcgcggggtggacgtagtagtcggttatgtggagccgcatatgcgcccgcagacaaccgtgctgttaaacgggctggagcaaatccccgcgctcgaggcggagcataagggaatcaagctgcgtgagtttgatttggaccaggcgatgaaacgcgcgcctcagcttatcctggttgatgagcttgcccacaccaatgcggaatcctgccgccacagcaagcggtaccaggatgttgaggagcttttgaccgcgggcatcgatgtatatacgacggtcaacgtccagcatatcgagagccttaacgacatggttgcgtctatcacgggcatatccgtgcgcgaacgcgtgccggaccatctgtttgacgaggcgtcgcaggtggagctggtcgatattgagcctgaggagctaatcgagcggctgaacgaggggaaaatttaccgcgatgcacaggcgaggcgtgcgctcggcaactttttcagcgtcgaaaacctgaccgccctgcgtgaaatcgcgctaaggcgctgtgccgaccgtgtcaataaaatatctgaaaaggtaaagccgacaggcggcagcgattattttacagacgagcatatcctggtctgcctttcttcgtccccgaccaacgcgaagattatccgtaccgccgcaagaatggcggatgccttcaaaggcggatttacggcgctgtttgtggagacgcccgcgtttgcggcaatagacgacgaggataagggcaggctgcgcgcgaatattcgccttgcgcagcagctcggagccgccatcgagacggtatacggggaagatatcgccctccagattgctgaattcgcaaggctttccggcgtttcaaaaattgtattgggcaggagcagcgcaagccggaaatacttcttcggcaagccgtccctgacagaacggctgactgccgccgcgccaaacctagatatttacattattccggacagggaaacaaggagttaccggccgaaacggccgcggaaacggccgcggaaacggcggatacaattttccgtattcgacttgctcaagagtatcctggtgctggccctttgtaccggaatcggttttctatttgattggctgggcttcagtgaagcaaatattattacaatttatatcctgggcgtgctggcgactgcggtggcgacaacaggccgggtttacagccttgtactgtccgttgcgagcgtcctggtattcaactttttctttacggatccgcggctgaccttccaggcctacgacagcggctaccccgttacgtttttcgtcatgtttgtggctgcgtttattacaagctcgctcgccacaaaaatcaagcttcatgcgaggcagtccgcgcagacggcgttccgaacgaaaatcctgttcgataccaaccagcagctgcagaaggggcagggaaaaaacgatattatttctatgacggcaaaccagcttgtaaagctgttaaagcgcgacatcatcttttacccggaggaaaacggacggcttagcgcgcccagtgtttttatggcaaatgaagatgccccggtggagctttacaccgtacccaacgaacaggcggtcgccgcttgggtttttaaaaacaacaaacgcgcgggcgccacgaccgacacgctcggcagcgcgaaatgcctgtaccttgccgtgcgcgtaagcagtacggtttacggcgtaattggtatcggcatgggggagcagccgctcgtttcctttgaaaacagcattgtcctttctattctgggcgaatgcgcgctggcgctcgaaaacgacaaggcggtgagggaacgggagcagtcggctgtgcttgcgaaaaacgaacagctccgcgcaaacctgctgcgctccatttcgcatgacttgagaacaccgcttacatctatttcgggcaatgcgggaatcctgctttccagcggggattcgatatctcaggaaaagaagaaaaagctttacagcgatatatatgaggactccctgtggcttatcaatcttgtggaaaacctgctttcggtgacaaaaatagaggatggctccatgcacctgaacaaaacggcggagcttattgacgaaatcatatccgaagccctgaggcacgtaagccgagaaagcagcgcacataaaattgttttccgcccgccggacgatatgcttttggtcaaggttgacgcaaggcttattatgcaggtggtcatcaatatcgtcaacaacgcaatcaagtatacgcgggagggctcggaaatccgtatccgcgtcaaaaaagaaagaaaaatggtgaaggtggaaatctccgacaatggggaaggcattccagacgaagcaaaggagcggatttttgatatgttctataccgcaaatcccacgagtatcgcggacaacaggcggagcctgggtctggggcttgcgctttgcaagtccatcgttgccgcgcacggaggggagatttccgttttggacaaccacccgagcggcgcggtgttccgcttcactttaccgtcagaggaggtaacgctgcatgaataaaccgcttgtacttgtcgtcgaggatgacgcggccgtacgcaacctgatatccacgacgcttgaaacacatgattaccgctaccataccgcgccaaacggaaaggaagcgatactggaggccgcgtcccataatcccgacgtagtgctgctcgatttgggcctgccggatatcgatggaattgaaattattaaaaagatacgctcctggtcaaacatgccgattatcgtgattagcgcgagaagcgaggataccgataaaatagaagcgctggatgcgggcgcggatgattacctgaccaagcccttctctgtggaggagctgcttgcccgcctgcgcgttacgtttcggcggctgcattacgcgatggaaaacgcgggtgcagacggcgccgtatttataaacggaggattaaaaatagattatgcggcgggctgtgtttaccaggacggcggggagctgcacctgaccccgatagaatataagctgttgtgcctgctttcaaaaaatgtgggaaaggtcctcacgcatacctttttgacgcgtgaggtatggggcagcgcatgggacaatgatgtggcgtccctgcgtgttttcatggcgacgctgcgcaaaaaaattgagaaggacccgtcctccccaaggtatatccagacacacgtaggcgtcggctaccggatgctgcgcgtggaatagctggtctacaaacgaaatatatatagtaagcgcccctgtccaattataagacaggggcgcttactatataaaaacatcaggagaagctgattttagccaaaaaactctgcttcaaccatcgcacagagcgtatggtaaacaggcagatggcactcctgtacctgcgccgtattatcaccggggcaggcggcggttacgtcgcaaagctttgacagcgtgctttccctgggcccggtgagcgctatggtgcgcaggcccatttgccgggcaagctttacagcgttgcagacgttttccgagttgccggacgtgctgatagctgctaacacgtcgccctttttgccgtagccaagcacctgctgcgcaaatgcaaggcccgggtcaacatcattgcaaaacgcggtaaacagcgcgctgtggttcgtaagggcaatcgcgggcaacgctttttgcagaagctgtggttcctgcgcattgcttccaaacgcggctgccgcgcgcgcataatcggcgcctgaaagctcacgctttaaattgaagcccttcatcagctcgccgacaatatggtccgcgtccgcggcactcccgccgttgccgcagataagcagcttgtgcccggaggaaaagcagtcccgcaaaagatagaaggcgtccataatttggcctgacagcggctttagctgcgggtaacgggtaaacagtatatcataatgcgcccttgcgcagtctcttggcgcttcggtgcccaccggcatcagcccaaggccgaggcaagcggtcaggatgctggcgtagtccccaatttggtcgcccagctgagcaggcttgatttcgcaggcggcccgtgctccagggattgcctcgcgcttgacggcgcgttccatcgaagggcgcaggaacttttcacagcgcgcgaaaatactgccgatgacgacgcgtgacgggttatataaatcgattaaataggaaacggcttccccaagcctttccccgatgatgtcccacagccgcagggcgtctgggtcgccgccatacgcgtattgggacaaaagcttcgcgctgaactgttcttcctgaaatccatcgattacccaggccggagtatggccgtttttcaactgctcttttgtatccatttgaataagctgtttaataccggaaccgccgcagaagccttccgcggaaccagccttcccaaaccccacaggcccgtctggcgctaggcggatgtgccctacctcgccgagcaggtcgttctctccggtaagcagccgcccgtccgaaataacgccgcagccaaagcctgtccccattgtaaggaaaagcatgtggctgctgccccggcccgcgccaagcttccactccgccagagcgccggcgttcgcgtcgttctgtaaaaaggcggggacttcgaagcggcgggtaagcatttgcgtaatggggatatcgtcccagccgggaaggtttggcggggacaggattctgccggtcctgctattgagcggtccgccgcagctcaccccgatggcgcgtatatctttaaaggaaagtccgtgctgcttcacaagctcctctgcttttttgacgatgcgctcccagaggggagagaatccttcttcggtgtgggagggaaactgtacccgccccaccatttcgatttttagccctgcttttgcgagaatgacggcgcatttggtaccgccgatatcaagcccgacgatatactgcatagaactgcctccttgtattgcgtttcattatctatagtatagcggatagaaaaaagtttttcaagcattttgcgcatataatttttgcggacgcaagaaaaggcaaaataaatactataatttcctaaatataaacaaattttttaaaagtttttaaaattttatcgaaaatatacgcgtaaaatgcttgacttttgattttatacgcgtataatgaagataaagaaagcgaaagggggaacggatatgaagcatgtaacggtggtcggctcgcatacctccgcctatttgatgcattgtccgcgtctgcctacccgcggtgagtttattatgggcgattccttcaacgaaacgctcgacggcgggaaaggctccaaccaggcgcttgcccttgcaaggctcggcgccccggtcgattttgtcggcgtcgtcggaggggacaaagcgggtgaaagcttccgccgctattttacggataacggggtaaaccttgattataccgtgacggttccggacggaaagaccgcgatgggtattgccttcatagacccgaacgggcaaattatcggcgcgactgaccccggcgttttaaaaagtatgacgcgtgcgcatgtggatgcggctgaaaaaagtatagagggctgcagcgtcctgctgacacagctcgaaatcccctcggatgttgcgctttatgcgtgcagggtggcaaaacggtacgaaaaggtgaccattctcaatccagccccggccgaccatatgacgctcgaccatatccgcaatgtggatatccttaccccgaacgaaccggaagcaaagctgctcctgggaatcgacccgcaggcagagatgacacaggaggaccttgcgattgaatatacggcacgcagccttccgtttgcgactgtaattacactcgggagcgagggcgcgatgattgtctcgcagggaaaggtccgcagggtaccatgccctaaggtgcaggcggtcgatacgtccggcgcgggcgactgcttcaacgcggcggtcgcttactgcattgcacagggcaagagcctgctgtccgccgtagagttcgccgtaaaggccgcgtcgttttctgtgatgagggaacaggtttggccgtcttatccaacggtcggccaaatcatacagcccggataaaattcttcgtaacaagggaggaaataaaatggacacaagcaaaaccgcgtatacctggaacgagatgctgatggtcccggtcgaagagctgcccgcgcgctccagagtgccgattgaaatattcgacgacccgaaggatatgttctatcagctcgcgcgcagggttgtggacacggtgaaaagcaacaatgaaaagggcctgaaaaccagaatcgcatggccggtcggcccgaaaaaaaattatcccctgatggtggaaatgtcaatcagggagaacgtctcctggaagaacaccatccattaccaggtagatgaatggctcgactggcagggcaggaagctccccgcaaaccacccgtttaatttggaatgctggctcaagcgtgaatttttcgataagttccctgaggatttgaagcccaaagaggaaaatatgtttttccaccggccgctcgaggtcgattacatggaccgcatgattgagcaaaacggcgggatagatatcctgctcggcggcttcggctttacagggcacatcgcctataacgagccggtaccaagccgctggtacgaggtatcggacgagcagttcaaaaacggctcctcccatatcgtctacacaaacgaggaaacctttatcatgcattcccaccgctccacaggcggcaatacccgccaaattccaccgtgcggcattacgattgggttcaagcagattttatctgcgaaacagatatatttggtctctgacgggggagaatggaaaaagacgatcctgcggattatgtgcttccacgagccgaccgcaaaatatccctgcacctttgttcaggagcaccccaacacattaattatggtagacaaaaagacggcggattgcccgtctatgaacttcattggttaaaaggaggaaacaggaaatggcaaagattgttctcatcggcgcgggcagcatggcgtttacgcctacgcttgtcgccacattcatcgcagacccgttttaccgcgggtcggaaatcgcccttgtggatatccacgaggaacgcctgacgattatgcacaacctgctgctcaggctcaacaaggaaaaggacctcgacatcaacttcaccgcgcatctcgacagggagacggcgctgccgggcgccgacatcgtgattctgtgctttgcggtcggctcgcatgaggcgttcctcaaggacaacgaaatcccgacgaagtacggctttgtccagtccgacggcgaaacgctcggaccgggcggaatttcaaggggcctgcgccacatccccgtggcggttgcaatcgcgaaggactgcgagcggctctgcccgaacgcccacctctacaactacacaaaccccatggctcccatgacacaggctgtttacaagtataccagcatgaaatgcacaggcctttgcatcggcgcggagcttactaaaggctttgcaatggaagtgctgcgcgaaaaggacaacggcgatatccagttcctggccgccggcatgaaccacggccacttcctgctcgaattgcgccgcggaacggaagatttgtacccgaagctcaggcagaaatgccgcgatatgttcaagggcaagaccttcaacgaggtaactgccgaaatggacgagatttccaagaatatgccggagaactccgcccatttcaacgagctttccctgtgcgtcgccatgtgcgccaagatgggctatttccccggcccgggcgacggccatatcggagagttttatccccagtggttcacctccacacccgaccagagaaagcgccacgacatggaccaggtatatatccgcaagctgcttaagacctataaaccgttcgctgaaaagattaagaaaatgtcgaactacgaaatgccgctcgattacgacctgttcaaggtcggaaagacgtgggaagaaagccagctcaacgatattgaaatcgcaagacgcgaaaaccagggaaaaatattccatgtcaacattcccaactacggctatatagccgacattccggacggaatcgtcgtggagattcccgttgttgtagacgcgggcggttaccatccgattggcgtcggccacctgccgaaggaggtcgccccgtgcgtcgtgcgccacgctttgagccaggatcttttgattgaagccgcgatggagggtgactttgataaggtgatggcggtatttggcaatgacccgaactgcttcgacctggaaattggcgagcagtgcatgagagaattgattgaagccaacattgaacatctgccgcagttccaaaaataaattcatccaatataaacgctcaaaacaattttttattgcacgttatgcgtaatacctgtataataaaaagaaaatattggaataaagggagcgtttatatatgagagtttccgcagatatcatattaaacaggcagcagcaaatactggaaaggcttcagcagcaacagaaattatcgattgacgagatagcagagatgtttggtattactccttcgagcgtccgcaggcagctgcaggacatggaggaaaaggggctcgttacccgcacctataagggcgttatgctcgctcccgactgggaatttgaagaggacgtccgctccaggcgctatgcgcagacgctcgaaaaacgggcgattgcaaaaaaagcgctggagtacataggggaaagggatatcatccttttgggcaacggcacgacgacgctggaggttgcaaagcagctgaaaaaccgcgaaaacctgattatcatcacaacctccgtccccgtagcggcagagctttataacaatcccggtattgaggtacagatggtgggcgggattgtccgcccatataccggttctatcgtcggcccgcagtccctgcgttttctggagggcgtccatttcagcaaggcgtttatcggcgcggactccatctccctggaaaacgggattacgacgccgaaccagattgaagtggacatcgaccgctttgtgatagaaaattcagcggaggtgttcgtactggcggaccactccaagttcgataaggtgacgcttgcgcatttaacggatctcgatcaaatcgattatatcataacggacacacaaaacagttcccagtgtatagaggagctgaagaaacggagccacccgagggtgctcgaagcgcctgtcgattataaataaaggcttcgcggatgccgccatatcgctgggacaagctaagtatggaaaggagcattccaatctcatgaaaaaaagaaataaggtactctccattataatgtccatccttctggtcgccgccgttttcgcgggctgcggcgaagcagccacatcgagttccggttcaccggacgcttcctccggcggaagctctggcggcgcggacgcggacaaatcgtttgagctgaccatctggcacgtcaatacggacgaggggcaaaaccagctgatgctcaactcgtataagcgctttaacgaaaaatacccgaatatcaaaatcaacaacgttcccgttgcgtccgacgccttcgagacgaagctcgctcccgcaatcggctccgacaacccgcctgatatttttatcacatggagcggcggcaagctgtttacctacgcggacgcggacaagattgtagaccttacgccgtatatggataaggacggctacaaggaccgtttccttgacggtgcgttgagccaggcgacctataaggacaagctctggggcgttccggttgagaacaccacggccggcgttttcttctacgacaaagagctgtttaaaaagtataacgtagaggttccaaagacttatgatgagctgacggcagcctgcgaaacctttaaagcggcgggaatcgccccgtttgcgctgggcaataaattccagtggcctggccagcagtattatatgtatctcgcgctcaggctcggcggcgctgaggcgtttaccgacgcggctgaaggcaagggagcctttaattccgagccgttcgtcaaggcatatgaaatgctgcaggatatgataaagaaggactacttcaacaagggctacaatacgctcgacacagacgccgggcagccaaagcagctgctctattccggcaaggcggccatgtacctaaacggtacctgggaggtccagcttatccagcaggaaaatcctgatttttacgaccgcatgggcgtgtttggattcccgtctatcgaaggcggaaagggtaacgcggttgatgttgccggtacgctcggagacaatttctacagtatctcgaaggcgtgcgcgcatcccgacgaggcgtttgagctgattcagtaccttatcgacgacacctccgtccaggaaagaacggacgccggcaagattcctcctgtaaagggcgtcaagatatccgacccgatacagcaggaagtactcgatatcgtgaataaggcggaatacgtacagctgtggtacgaccagtacttcacggcggaagtcgccaacaagttcttacaggccaaccagtcggcctatgccctggagctgacgccgaagcaagcggctgatgttctccagaaagcctatgaggaagaccagaataaataaatgactgtctgtgccggcgaaaaacgaattccttctttctttcgccggcacagcttttgaaaaagccagggcgggccgcatatgcggcgggctttggagaaaaaggaggcggatcatcttgtcagagatacaaccacccggcagaacgctcaagaagcaccgccgcagcaaagaaaaaatagtggtcaactgcctgtttctgctgcccgcagtcgtcctgatcggggtatatatcgtttatccgataatcaattcgttttatatcagcatgttcgactggaacgggctcgacccggtcaagaagtttgttggtcttgcaaactgggaaaagctgctgcatgacccgatattcggcaaggcggttttaaacaatatctatattgtcgtattatcgattgttatccagcttccgctcggaatgattgtcgcgattttattgacggaaacaaagcactttgcaaagctattaaaaacggcgtttttcctgccgatgctgatgtcggcagtatccattggcattctgtttacgtacattctcgacccaaacttcggcgtcgtaaccgctgttgcggaggcgctcaatatggccgcgcccgatttactgggctcgcaggcgactgcgttgtttacagtggtgctcgtcatctgctggcagtttacaccgttttatatggtcctgtttgtgtccgccctcgctaccgtgccggccgacacaaaggaatactcgcagattgacggcgcaaacaagttccagtattacatccacattgcaattccgattgtcaaaaataatatctttaccgccatggtgttgtcgctgattggttcactgaaatacttcgacctggtgtacgtccttacaaacggcgggccgagcggctcgacggagctgatggcgacctacatgtataaaaccgcttttaccagcagcaacaagggctacggaagcaccatcgcgatggcgctgtttatcatcgttatgattttctcgatgctgtgtaactggctgccgcgtaaaatcagcaagcgaggtgaacggaaatcatgaatggcgtcatcaaaaaaagaagaaagcctctgcggataggcaccgttatcaaatggctgtgcctgctgattatcctcctggtctgcgtcgttccgtttatctttatgatatttacaagcctcaagagcagcgcggacctttatacgattcccgtataccagatgcctgaggtattccactttgaaaattactggcaggtgctcacgggagggaccttcttccagtacctgctgaattccttaatcgtcatggcggcaagcgtgctgcttatcctgctcgtttcctccatggcgtccttttccctcgtgcgcgtcggctttaaaggctcttccggcgtgctcggcatgattatcgccggtatggcgattcctgtccatgtcgcgcttgtgccgctgtatttgatgagcatagacatggggacctacgataccctgtttgcgctgattggcccgtatgtcgcgttccagattccgatgtccatctttatcctgagcgacttcatgcgtaccgtcccgaaggaaatcgaggaagcggccatgattgacgggtgcccgcgctataaggtattctttaagattttcctgccgctgacgtccccggcgctcgtaacgctcgcgatttacaacgcggtacagctttggagcgagttcctgtttgcgctcgttttgacgcaaagcataggcagccgcacgctgccgctgggcatctgggaattcaagggcgttcaccaggcggatatcccaatgattatgaccttcctgacgctttccaccctgcctttgttcctcgtgtatatcgcgggacaggaccagttgattaagggcatgatggtcggttcggtcaaggagtaaaggggagaattttatgcgcagggtttggcagacaaaaaacgggcgtttgcgtgtatgggaaacaaaagacccggcacgtatcgaccgcagtgtgctccatatggaaaacagcagggtccgtatcagcgtgctgccggctgacggcggaaggctgataagcctttatgacaagcagcgtgattttgagcacatctggacaaacgaaaggacgcgccgcctgccgcggtattacggggcgaattacgacgacctttccgcgtccggtctggaggaggccttcccaaccgtgcagccctgtgagatagacggtgtgacactcccgttttttggcgaggtgtggtctatcccctgggagtatgaaatcgaaacggacggggacgaggcggcaatccgaatgtggtgcactacctcgattaccccggcaaagcttacgaaaacatttttgcttaaaggggacgaagcgaagcttacgacgcagtaccgcgctgcaaacattggcgcgggcagcttcccctacctgtttggcgtgcatccgtccatctgtgtgacggaggatacgcaggtctttgtaccgcaggcgtactaccaaacgggttttttgtacccgccggacctgtctgagcagaaagagtttgcctggccggagctttccggcagaaaccttgcaaaaacctacccctttgccgataacctatgcgtcaacttttacacggaccacgtggaaaaagggatatacggcttttaccataacaaagaaaaatgcggaatcaacatcctgttttctcctaaagacttcaaaagcctcagcatttggctgatttacggcggatggagagggcattactgcgcaatgactgagatgttctcctgctggccggctgatttacggctggcgctcgagcagggcatccatgaaacgctgcgtgcgggagaagaaagggaatataaggtagcatacgagcttaccggcgaacgcgccgggaaaggttaggattacaagagacattatcctccttcttgtcttaatatatttgggtgggcccggagagccgaaaaggcgcttcgggctttttccgtgccgataactcctgttttcatggggaagaatataaataggatgcacatagggaaggagaagggtgtatgcggcagcttcaaataacacaaatagacggccggaaatggtacgagtttgacgcggtaataaaaaaggtggaggaaattgacggcgcgtatattgaaattccgttcgacgttaaaaaggaattcggaaaggggcgcgtccccgtcaccgcgctgttcgacggcgtctcctataacggcagcctggtgcggatgaaaacgccgtgccatattatcggcgtgcgcaaggatatccgggcgcaaatcggcaaacagcccggagaaattgtgcatgtggcgcttaccggccgggcctagcttattttgtaaaaaggataaacttttcgtgactttttgaaacaggcatggtaaaattaaaaagacaaatgagatacttctgaaatgggggcagcacgatgagaaaacgaaagatggtcgcgccgattgtaattacggcgttaatggcggtgtttttatttctttatctcggccttatcctttttgtggaggtacccgtctgggtcaaaatagcggtaggggccgttttggctcttgattatggagtgtctatttttgttttggtagaacgcattaaagaaataaggagcggtgaggaagatgatcttagtcaatactgattacatcacagggaaaaaccttgaaatgctggggcttgtaaagggcagcacaatccagtcgaagaacattggcagggatattacgcagagctttaaaaccatcgttggcggcgagctgaaggcgtacaatgaaatgatgaacgacgccagggcgcttgcaacaaaaagaatggtcgaggaagcgcagtccctgggcgcagacgcggttgtaaatatccgctacgcttcttccgccattatgcagggtgcggcggaggtcatcgcctatggcaccgcggtaaaatttgtctgattcttaaaataaaaccgcccgcacggaaaacccgtgcgggcggtttttgctatgataaacaattgtcagtctgtcaggagcaggccgtatttgtctttaaaggaaccgcagagaatcagaatccaatcgacaagccagccaattccaaacacgccgccggtaagaatccagagaataccggtaccgacctttccgacatagaagcggtggatgcccagataaccgagaaaaaacgccaggacaaacgctgcccacttgcttttgcttgaaaccgaaggctgctggttgatgttattgataatgaccggctggccggcctgcgcgccctgtggctgctgcgctacgccgcactttgggcatataactgcctggtcagaaatttgcgccccgcaatttttacaaaacatgtaatagactcccccttcatacggcaatagaggccgttttttttattataatcgaaagggcggctgtgtgcaacaaaatagataatattgtctatatcttaccaaaaacgtgtgtacctgcaggttataaatttggggtgagttttttcaatctgcgttgattcttttgagcctgaaagcgcagataaccagcagcgcagcggagataatcagcaggggtaaaagcaattttaaatctgtattcccttggcacattgcttgaaagccccatgccgccgggaatatttttccaacagcccctaaggcttcgggcagcatatcggcagggaacatgatgccggacagtataattgatggtaaaaagacgacctggcaaagcaaggtaagcttggatacgtttttgacaaacaggccaaaagcggtagcaacgcacatgcttgaaataatcagcagggcgagggaaagtacataggaaggcaggttttccgggacggacgccttaaaaagaatcggcgccgcaaaaaatataaccgcgctcatcaaaaatagatggagaaaaccggagataaagttccccgcggcagcgctccacagaggaacgcctcccgcgcggtacgctttttttatgtcgctccccagtatttccgccaacgggacggggccgcccaaaaggccgcccatgctcacgccgaataccgtcatggactggataagcgttttgtccgcgccgggaaggatggaagtgaaaataccgcccataaagaggaaaaacaccagcgggacaatataatacataattagaatttccttgttgcgcaggttcagctttaagtgaaggcccacactgtacaaaaacgcgcccatttaatttccctccttagcaattgcaagaaagcggtcttcaaggctttcctgcttgagccgtacatcacggatagaaattccctgccgttttgataaaaccgcagcttcttcaagcgcaccggccaggtcttccgtttcgaatgtccaatacccacgttcctggctgatatacctgctgttcgttaggccctgtaattccggtggggaggaaaagcgcagctgcaaaagaaagcctcgctgaaattcctggacaagctccgccggcgaaccgattgcctctattttgccatccttcagaatggctgtccggtcgcacagctgctccacctcaggcatatcgtggcttgccagcacaatggtttttccttgtttttttaaacggcgcagctcgtcatgcagcgcggcccgcccctcaacgtcaaggcctgctgtcggctcgtcgagaaaaaggatgtcggggtcgccgagcatagagagcgccaggtgcagccgccttttctgcccggtagacatatcgccgtattgtttatttaaaagcgcgtccgcaccgaccgcgcgcaggtttttttcgtcaggctgtacgtgcttccattttgaaaaaaagcggagcgcttcttttccctttatattttttggcagggaagaggactgcaattgtattccgataccgccctttattttaatttcaccctgctcgtaccggcgcagtccttccatgcattccagcgcggttgttttgcccgcgccgtttacacccagcagggcgaagatttcaccctgctgaatggtaaaggaaataccgtgcagcacttccgtttttccatagcttttggtcaggcttttaacctcaatggctgttgttgtcatagctgctgctccattcccggaaattctatgccgctttttaagaaatactgtcctaggacggcctccataaaggggtcgatttctttttgtttgttcgcgatatcctcatcccagcctgatttgtctgtgttgaattccatcagattgggcagcaggctcatgtcgccgcccgtaaattccataatcaaatcccaccattttttaccgaacgccatgctggcttcactgtcaggcggctcgttctgctgaatcagccttaaggcttcatccagcaggccgcggtatgtatcaatcagcctttcgccaagctccggccgctgcataaagcgttcctgtatatggtcggtaagcgttttgtcgaggcatttccagacccagtaatttttgttgcccatgcgcaaaagctcaataatttccgcatacttcttaaagtccacctcgtcaatgcgcagcacctcagagcgcagcgattcaagcatcccggcggctgcctggagggaatcaatctgctgctccactgccgtctgctgctgttccaaaacggcggcgacctcccgcggcgtatccagggacaaaagcctgtctttgatttcatccaaagagaaacccagatatttaaaggacaagatttgatggagctttatcatatcctttggggaatagagccgcctgccgccgctgctcaaggcggagggctttaaaaggccttctctgtcataatattgcagcgtgcgaacggtaacgcccatctggcgcgcaagctcgcccactgtcatgaagccgttttttatctcaatcaccttcatttttatcatttccatattaacatgataacatatgacgttacgtaacatgcaagtgttttattggaacggaataaatttcctgttatctttcaaataggaacagcccgcttgattatgtaccagatttttctatgaagcgccgctccgcgttatcttaaaaacaaaagtccggcgtactttaagcacgccggacttttgccttgatttaccataatcagtcgatttctaccattacctttgtgttgcttctgatagcggcactgcgggcaatcgtacgaatcgccttggcgatgcgtccctgcttgccgataatcctgcccatatcgtcctcagcaacatgaatgtggtaaacaattacaccttcctcgttgggctcgtcctcgtcgaccatgacctggtcgggagcctcgacaagaccctttgcgatagtcgtgagtaattctttcatgatattaaccttctttcttagtcaatcacgtcgttcttcttaaagagggcctttacagtatctgtgggctgagcgcccttggaaatccagtccttcgccttctcggcgtccaccttgaactccgccggcttctgaagggggttgtaataaccaatttcttcaatgaaacggccgtccctgggatatctggaatccgcaactacgatacggtaaaaaggagacttcttcgcacccatgcggcgcagcctgatttttactgccatgtcgaactcacctccgaacacaataaaataatacttatatcttcaccaatcagctcaaacaccattggatgaatacaaattttagaacctgcccattggaccgccaagccccggcagattacgcattttgcgttttgccttgcccttgccgccgaactgcttcatcattttctgcatttgctcaaactgctttatcaggcggttgacatcctcgaccttcataccgcagcccgcggcaatcctgcgccgccgtgatgcgttgagcacggaaggctttgcgcgttcttctgccgtcatagacaggataatcgccgcgtttcggtccataatcctgtcgtcgatttcaacatcctcaatctgcttgtcaacacccggaagcttcgacaatatatttttcagcgggcccatctttttaatttgctggaactggtcgagcatatcgtttaggtccatctggtttttggccatcttttcggcaagctgctcggcctttttctggtcgagcttgctttcggcgtcctcgatgagtgtcaaaacgtctcccattccaaggattcggcttgccatacggtcggggtggaacacctcgatatcttcaagcttttcgcccgtaccggcgtatttaatcggcctgcccgtaaccgcacgcacggaaagcgccgcgccgccgcgcgtgtcgccgtcgagctttgtgaggatgacgcccgtaatgtcgagcaggtcgttaaacgactttgccacgtttacggcgtcctggccggtcatcgcgtcaaccaccagcaggatttcctgcggctcgacctcgccctttatctttttaagctcctccatgagcgcctcgtcgatatgcaggcgcccggcggtatcgagtattaaaatatcgtttccatagtcccttgcgtgccgcacggcggccttcgcaattttaacggggttctccgtacccatttcaaacacgggcgcgccggccttttcaccaacgaccttcagctgttcaattgcggcgggacggtacacgtcacacgcggcgagaagcggccggtggccctggctttttaaaagccttgcaagcttgcccgcgtgcgttgtcttaccggaaccctgcaagccgcacagcatgacaattgacggaggctttggcgcgcttgcgagctttgcctgctgcccgcccatcagctcggtgagctcttcgtttacaattttgacgaccatctgcgcgggcgtcaggctttccataacggcgctgccgacggcgcgctctgtgaccttattcgtaaaatccttcgctaccttatagttgacgtccgcttccagaagcgccaggcgcacctcgcgcatggcttcctttacgtccgattcgctcagttttcccttagagcgcagctttttgaacgcggcgttgagtttatccgataaaccttcaaaggccaaggcgaccatcctttctgttttctgttattctttgagccttccggctgtatcgataatgacgcgcgcgcatttttcgagcgcgccgtcgcggtattcctgttcattgagccgggcgatttcccgcgcctgcgcgctgatttcgccaaggcctttctgcatagcctcaaagcgtttataaaggccgagctttgcctccatatcaaatagggcggcctcggtgcgcttgaccgcgtccctcacgccctgccgtgtaatgccaaagttttcagccgtctcgcttaaggacaaatcgttgttataatagcatgcggtgatttcccgctgtttttcggaaaggaggtctccgtaaaaatcgagcaggagagaaatctgaaggttcttttccatcgttcccgctcctgaaatcaaactgtaaagcttttttctttacaccttagtgattatacggtatctgcggcggtttgtcaacccttctttcggggtatgggatatttccagccaatacaagcttgacaggcggaaaaaaagggtgtatgctttatctcgacaaaaatcgaataaaaacacaggggtgctgattttcggctgagagcgcggttgcgtaacccttacacctgatccggataatgccggcggaggaagtttgttttcctgttttgtgaaggcacaggctatcataaagcagcgttgtatatttcgccgtacggttttccgtacggcgttttttatttgaagtttaaatttgaggagatgtttttatgaaccagaaaaccctgcgccttgtgacaagcggcgtgctgattgcccttggcacggtgctttcgatgattaaggtgttcgaccttccgtacggcggctccatcacgctgttcagtatggttccgctgatggtgctcggctacatgtacggcatccgctgggggcttttatgcggctttgtgttcggcgtgctgcagggagtgctcggcgcgacgaccagccaggcatttgcaggcgttaccggctttaacgtggtgctgatggcgtttcttgattttatcgccgcgtttatggtgctgggccttgccggcatgttccgcaaagcaatcaaaaaaccaacgcttgcctttgtgcttggcgggattgtcacggggcttttgcgctatgtgtgccatttcctttcgggctatatcctgtggggcagctatgcagaatggttcttcggcgacgttatgaacaacggcaccggcaattatatcctcgataacttcacgggcgattcgctcgcaatcctttattcgctgatttataacgcaagctacatgctgcctgaaattgcgatttccgtggttgggattattatcctgatgtgcgtaaagcctatcaggaagcaggtgctcagccattcccacggcctggcgtaaaacaacaggagaaaagcagcctgtccaaaacggacaggctgctttttatatcagacaagctcgttcatcacaagcccagtaatcagcttagggtagaaataggtggatttctgcggcatcttttcacccgcagaggcaacgtcgcgtatttgtgtcaccttagtcgggttgagcaggaaagcgcactgtgcctttccgctttgcacagcctcgattgcctcgtcaaagattttggtataggtgaggttgatttgctgcgccatgttctccgcgtcaatgccgaaaagcttttcaagcaccagcgtatgtaaaacggtaacgtcgagcccctgcgtcgcttcgctggcatttgggagcagttccttaatgggggcgagggttttgagcgtaagcagcgaccatttttcgccgcccgcgtaaaaggcaaacgcatttttacccttttggaactctctgctgagttcctgctcgatagtctccgtccctgttttttccgtgatatcaaaataccgcgcgcaggcctgcatggcctttgcggcgtcaaagtcctttaaatcgcgcacaaggcggtgcgtcgggaacacgacaaggccgggatgctccatctcgacgagcatcatcatctggtaatcgacggcgtcgccttccttggctttgccggtttccctgcaccagttacggtaattgagcgccgtctcgtaacggtggtgcccgtcggcgatgtacagcttgcgttcgttaaaatcgccgcagatggatgcaatttctgtttcgtcggtaataatccagagccggtgcgtcacgttttcctggtcggccagctcaatatcgggcgcggcctgggaaagcctgtcaagcttgccggttgtctggtgctgttcatccatgtaaagggagtaaatctggctgaaattgcagttggtcgccttcatcaggttcaggcggtcttccttggccttcgagagcgtaaactcatgcggcaggacgatgccctttgaaaattcctcaagccttaccctgcaaatcatacccttgacctttgtgcgtttgccgtaggcctcgaattcctcttcataaatatagatggccggcttgtcctcggcctttaaaacgccgctttcctttaggcttttaaaaacctccgctgctgtttcgtaagggcgctcgccctttggaagctccaggcggataatgttgtactcgtttgtctcaatataggaaagccgctgctcttcgctgatgatgtcatagggagggcatacaagctcctcgatttttcctgccttttcggtgtcgaaacgcaccccgcggaacggttttacaattgccataacccagtctcctttattctcgaaaaatacagccgtgtttgccttccattgtatcttttttccactcgcgcgtcaagtaacacggcgccgcaaggggcggcgttttgactttttataaggagaagcctatactaaagggactataataaaaagcttggaggaggcccttgtatggagatttttgatttccacgcgcatatttaccctgaaaaaatcgctcgtaaagcggtacaaagcgtggggcatttttatggaatcgaaatggactgcgacggtacggcgcgcacgctcgttgaaaaagggaaggaatcgggtgtgtcgcggttccttgtacaatctgtggcgacgtcgcctgcgcaggtctgctccatcaacgactttatcgcgggagagtgcgcgctgtatccggagcttacgggctttggcacgctgcacccggacatggagcgcccgtttgatgaaatcaaacggattcaggcgttagggctcaagggagtaaaatttcatcccgatacgcagaaattttatatggacgaccaaaggctgttcaagatatacgacgcgctttcacaaagcggcctgcctgttttgatgcactgcggcgattaccgctattcctattcccacccgcagcgccttgcccgtgtactcggcaattttcccagccttacggttgtggccgcgcatttcggcggctggtcgttgtgggacctggcgctggaatatttaaaagacaaaaaatgttttgtggattgttcaagctctatcatgtttttgggtaaagtgaggagccgcgagctaataaaagcatatggagcagagcgggtgctttacggtaccgattttcccatgtgggacgaaaaggaggaaatcgcgcgggtgcaaagcctcggcctttcccatagtgagctggagcttattttcagcggcaacgcgaagcgggtattaggggaagcctgatattaaaaactatgaaagaaaagaagccggacgccctacggggcgtccggcttcttttctatgcggggacaaaaaattattcgtggcggggcggaaggtaggttactttataaagagcgttgccgtactggtcgtagccggagatttcgccggtcaggccgaagctgttggttggcagcatttcggttagtgtgaccgtctgcttaccgttattattattgttaatgatgaaagagccggtgtagatgatgcggataagggcggtatacgagctttctgatgttttatacatctcaattccaggccagctctgcggaatagcgccgtcccagtaagaaatacggcagccgtttgcgttgtcccaatttccgtaggccgagctgaaatagatttttttgtaattgaggctgacgcttacccaatagccgttgtccaggccggttgctgtcgttttgtcggcaaaaaacgtatcttttccgtcaagcaggtcgaggtcaacagtctggttgccttttccattggtaaatataacgtgttcaaaggtttcttcaacctctgccagatataatgatgagccgtcctgctttgtcatctggacgcccggccagggaacatttatatcgcccgcgtcgttccaggcgtagcagtatacctcggcccagtttttacagtagttatcaaaatagatagaacgtgcggcaggtgtatcagccgctccggccatagtcagggcgctggcgcacagtaaaaccgccatacatactgcaagcagcattttgatgattttttttgattttttcatgattacttctcccttgtttaaaaattttgtttgcagaaagcaaatactacccagtttattctctgtttttatggcttagggaagaacgcattattaggaacataaataactgccatgccttttactgcattggaaagcctcaatcagaatatttctgaaattatcgcccatgaggttttaatacggatggtcctttaaacggtatgctgtttctgttaatcctcagtggttttaatttcggacagcgcggtcagcctggaccgggttcgtcaaatacgacctcatacagcgcgttgccatactggtcgtgccctgtgatttttccggtcagccgcatattattggtgggcctggttgtcaatacatttgtctgttttccgttgccgccgttgttgatgattaggttatcggcgccgtatgttctgacgatatacacatttccagcatggtacatttttatgccgggccatgcctgcggcgagtcatcgctccaatatgacgcgtagcaatccgtatctccccagaaatccttaggaaagaaataagtagttgcgtaccagctgtagtgcctccactctccattgacctttccctgctcgattttgttgccgtagaaggtgttgtattgctccaggcgtgtcaggtcaaacgtctgcagccctttgccgtcggtaaatatgacagatgtgaaggcggtatcaacatttgccatccagcaggatgaatattcatcggcggtcataagcacaccgggccaatcggcgttgtgctcgcctgcggtattccacgcataacagtaaacctcagaccagccggtgaaatagttgtcataatatacttgtttgacaacaggctcttccgcggcaccagccatagacaacgcgctgatacacagcagcaaggccaggcaggcggcaagcagggattttgtgactttttttgtttttttcataaataattttcctcctttttataatccttttttgtaatttgaacagcataccatttatcacttataattatatataatctttttaataaatacaatttaaaattgtaacaaattataattgaaaatattgttgcatattttacataccttttgtttttcgacaataaacgacaggcgcgtttgcggtacacaagctccctgtaataaaattttaaaaataaaattaaatgtggattaattttattgataaatttcataaaaatagatttcatcgataaaattcgacaaaatatatgatttatatcactataatagttaatgaaatagtttttatttaaacagtctgaaaattttcttaattaaggacaaatttaaaaaatccagaaaggaggccggaggtgtaaattatatgtctgcgttaagaaaagctcgtgataaaaaattttaaaacggaggaaagaagaaaatgaaacagaaaattttatcggttttactcgtagttatcatgattattggcgtagtgccaatcgcttctgtaagcgctgctaatcctattgacgcggcagtaagctgggcgctgggaattgcaaacgatgcaagatacggttacgaccagacttaccgctggggagagctgagccccgctccgggttataccaacgcatgggattacgactgcagctcgttcttaattaccgcgtggcaaaaagccggagttgctgttaaaacagcgggtgcctcatataccggcaatatgaaaaccgcttttataagccaagggtttaaggatatcaccagcagtattaatttgtcgtccggctccggcctgaaaaagggcgatgtccttttaaaatcgggaagccatacggcaatggtgtctgctgtaagcggcagctccataacaatcgtacatgccagcattaacgaaaaaggaacggctaccggaggcgtacctggcgaccagacaggcaaagaaatctgcactcgcagctactataactttgcaacctgtgttttaaggtatggctctaccacaccgccgccgtcttcaagctattatccgcaatacacaggctcgtctacatctctggttgaagcgcttaatgccgttggcgtagattcttcctatgataacaggaaagccattgctgctgcaaacggaatcagcaactacagcggtaccgcggcccagaacacagaattacttaacaagcttaaggctggcgttcttataagggcaggttcagcggtaagctattatcccaaatatacggggtcttctacgtcccttgttgaagcgctcaatgcagttggcgtagattcctcttacaataacagaaaattgattgctgctgcaaacggaatcagcaactatagcggcacggctgcccagaatacggagctgctcaacaagctaaaggcgggaacccttataagagcataaatgtgtttctgctgaaaaagattctttcgattattaattaaaaacctgtcccgctcaccatcaaaggatggtgagcggggcccggcacttagggaaggccctcccccaaaaccacttaggggagggccttccctttgttgtaagcgaaaacccccggctgtgccgggggttcaagaaaagcttaaacgatatataggaagtaaaaactccttttggtaagataagagtgcggcctgacagcagcactaaaataccagaaggagaacattcggatagtgaatgacaataaaagtttagcacataccacatggagcatatcgtatttgccccaaaatatcgacggcggatattcactgcgtccttttttgctgaattttacaaccataacaatcgcgtccggacgaactaaagataacgcggagatttgactttaggtgaccatcggggggcaatggtgggccaagccgtacaaaactttctgctttgtaggtaactttgcgtgacggtgtggttgtcatatataaagtcttcttactaatccattgataaaagatgcaacgcgctttagagcggaagatgtttatgatgtcctgccatgctttattcttattttttgtaaatcctgcggattatcaacccactcttcaacaaagccgcaattacaacaaacaaatctatctactattgctgcgctgaatatagtagcacctgtaaaaataacattaccttttgcataattagttttttgacctttcactattactatatcggaagagtgacatttaggacaagtttttgtatttttcactgcaatctccacctgaataaaataagtaaatttatatttttattatatcaaaacctgccggcaaagcaacttgagctttttcgataagtttcagcatctggcggctaacagggaatcctgctggcagccaaaaaaaggcacccacctatcggtgaatgcctttttggtgggccatcagggactcgaaccccggaccgaccggttatgagccggttgctctaaccaactgagctaatggcccccgctatataaagaatgccaaaacattatagcaaaaggcggcccagttgtcaataaaattcccaatggtgtgtaaatatgatgcaccgtgatgattccaaaatatccgaggataacaaaatttatgaaaaagggggcgtgtacctattgcacgcgccccttccctggatgcatgcaggaagataaaacggctttactattttttgtttggcctgcacgtttaacgcgtcctgccgttttttatacgggcagctcggttgggcaggctgccgcctcggtatccggttcagtcggaacggtcggatcggtaggcatgcttggttctgtcgggtctgtaggcggcggggaatcggttggacaatccgttccgggagacgtaggcagggtcggggggtcccatggatcggttggttcggggtccggtctgggatttgttgggggtggctgcggcgggtcggtggaaggctgcggcccggtaggctgcggctcggggtttggggttggcggttcaacgcctgagttcgtcggctgttcaaaggccccgcctgcattggagggcgcatacgttccttcagaggaggtttccactctgccggggtcgggtttgggtacaggcgcctgcccgccctgggacggctctgtagggtcggttgcgccgattgggaaatccggatagctttcgggctctgtctcctgctgcgatgtgcctccaattggcttttgagggcctgtcggaagcggctgctttggaatttgaggaataagaaaggctgcgattaatacaataaccaggcaggctgccgtagtatatacggctctgcggggaaggccccaaacggttcttttttcaccgaaatggattatttttatcaaattttccttttgttctcttgaggcgctgattgcgttgtttgccttccggtaatgtttctcaaacatgcaatccctccttttccaagagaggcctgaggcggtccctcgcccttttgagctgcgttttcgtcgcagactcgctttgccgcatgatttgggcggtttccctgacggaatagccctcaaaatagtacaggtgtaccgctgtcctgtatttttttggaagcttcaacaccgcgttgtatacaaaatcctcctcaaaaggatatgcttcgagcgaggccgcctctcttaatgatacaatatgtttattccaataactgctgagcatggtgcgcgaacaattgattgtgacacgtatcagccatgctttgagatggtcttcgttttttatcttatctgcatttttaatcagccgcagaaaaacttcctgataaatatcgtctgcgtttgccttgttccgggtctggttcagggcaagccgtaataccatgtcggaatatttttctatgatatcatccatagaattgccagcacaaaacaattccaccgcttacctacccccttcttagagaaaaccattcattcggcaaaaaagtggcaaaaataataaaattttacatttttctcgttcccgctttcatattaacaaaaaaagagcgggcttttcaaattattttacggagaatttacagggaattcttgagaagaataaaaaagagcgttttctttacacagattttacaaaaggaagaccggaattttacctgcgtcatctatgatacacttaaaatagagaattgcggtgttttttgcttttctttgtcttgtacgcagaatgcggcgcgtagaattgcgcagtgtggaaggaaaggaagtctacatggatattttttcagtgcttacactgctgggcgggctggccctgtttttgttcggaatgaacacaatgggcggcggcctggaaaggctctcgggcggcaggctcgagcggacgctcgaaaaaatgaccgacaatacgtttaagggctttttgctcggcgctggtgtgacggccgttatccaaagctcgtccgccaccaccgtaatggttgtcggctttgtaaactcgggtattatgcggcttgcccaggcaatcggtatcattatgggagcgaacgtcggcacgacgattaccgcgtggctcctgagcctgacgggaatcgagggcgacagctttgtactgaaccttctaaagccgtccggttttgcaccaatactcgctttcatcggaattgcgcttttaatgtttgcaaaacacggaaaaaagaaggatgtcggaacaattttgattgggtttgccgtgctgatgttcggtatggacatgatgagcggggcagtcaagcccttggccgacgttccggaattcaccaatatcctcaccatgttctccaacccgatattgggtgttctggcaggcgcgctccttacagccgttattcagagctcatccgcttcggtcggtattttgcaggctttgtccgcgacgggcagcatttcctatgcgaccgctatcccaattattatggggcagaatatcggtacctgcgtgaccgcaatgatttcctgcattggcgcaaagaagaacgcaaaacgtgccgcgtttgtacacctttatttcaatatcatcggtacggttataattcttgcggcattttatgggctaaacgcgctgctgcattttgaatttgtcaaagacgtggtgacgccggccgatattgcgattatccatacggcattcaatctactggcaacggcactgctgcttccgttctccaagttccttggaaagcttgcctgccttacggtgcgcgacaaggacacacaggacgacacgccgttcctcgacgaacgttttctcggtacgccggctctcgcggtagagcagagcgataatatggcgattaagatggcgcacctttccagggagatgttcttaagcgcggttacgcttgtagataagtatgatgagaagctcgcggaacaaatcctgcaaggcgaggaaaaaatagacgcctacgaggatgtgctcggcacgtatcttgtaaaaatcagccgcaaaagcttaggcaggcgggacagcaacgaggtagcgcgcctgctgcactgcatcggcgattttgaacgtatcgccgaccatgcggtcaacctggtggacgcggcaaaggaaatgcatgaaaagaaaatatcgttttccgatgaagcaaagcgggagcttcgtgtcctgacgggcgcgcttaccgaaatcctgaatattacgatggatgcgttcgaccaaaaggatatagcgcttgcaaagcaggtggagccgctggagcaggtgatagacgggctgcgcgataaattaaagcgcaggcatgtaaaacgcctgcaaaacggctcatgcaccatagagcttggctttgtgctttccgaccttctgaccaattacgaaagggtgtcagaccactgctccaatattgccgtctgcttgattcagataagcatggacagcctggaaacgcatgaatacctgcatgatttaaaggaaagccattcacaggaatatgaaggggaatatgaggcgtacaaaaagaaatacgtattaccctgaaccgtccttatatcaaaaggaaacggcgctccgaaaattcggagcgccgtttcctttttaagtcatagcacatcaaggtgctcaagcagtattttgattcccataaagataagcgcaaggccgcctgcgagctccgctttatttttatagcggatgccgaacctgttgccaatggcgacgcccgacgcggaaagaataaaggtcacggcgccaatgagtaaaacagcgccgaaaatattgacactgaggaaggcaaacgtaacgcctgccgcgagcgcgtctatacttgtagcgaccgacagcatcaatagctctttcaggtcaaaagattctttcttttttccgcagcagtcttcctttttaaaggattcatagaccattttgccgccgatgaaggcaagaagagcgaatgcgacccaatggtcgaagtccctgatatagcgtgcaaactgcgtgcccaaaagccagccaaccaggggcatcagcgcctggaagccgccaaagaaggcggcaatcaaaaatgagtatttcctattgtatacgcgcatattgagccctttgcaaagcgccaccgcgaatgcgtccatggaaaggccgagcgcgataaaaaacagttcgacaatgccgataacgaacaccccttttaaaaaatgaacgcagcttcaatcatatcaggatatggacaaaaatgcaaaaaaacagccataaaaatatgtttttagtcgtattacctgtttttttacgggaaagtttgtacaagttaccgttgaagaatagattgtaatgaactttcccttccgatatactgatattgagtaatatgaaaaacactcgcgcgatatacattctaattctttaaaattcaaaggaggaatcccggtgaaaaaatccagaaacaggttcataagcgccgttttatctgcgctgcttttgctgacggcattttcctgcgctgttggtgcgcagccgctccaagcacagaaaggcgcggcgccagacggctatggcctaacagaaaaggttgaggacggcgcaatactgcacgcatggtgctggtcgttccaaactatcagggaaaacctggaaaatatagcgaaagcgggcttttccgcagtacaaacctccccaatcaacgaatgccttgtcggcgacaacggcgggatgcagctgatgggcaatggcaaatggtactaccattaccagccgaccgactataaaatcggcaattaccagcttggcacagagcaggaattcaaggagctgtgcgatgaagcgcacaaatacgggattaagattattgtcgatgtggtcgcaaaccatatgacttcgtccaccggctcaattaaaagctatatcaaaaacatggagggcggcgcgttccataacggcggcggaatttccaattatggtgaccgtaaagacgttacgcagaacagcctgctggggcttattgatttaaacacgcagaacccgaatatccagcagcttattttaaattatctcaagcagtgtgtggcagccggggcggatggcttccgctacgacgcggcaaagcatatagaaatcccggaggacgacccttcgtttgcaagcgatttctggcctgttgtgctcgataatgggtcgcggttccagtacggcgaaatccttggcagcgcggactgcggcaattaccaaaaatatatgcatgttaccgcctccgaatacggcggcacaatccgcaatgcaatccgcaatggcgatttaaatgcaaactccatcagcagctacagcaactccgcctcggaggataagcttgttacctgggtggaatcgcacgacaattactgcggcgacggctcgtggagagagctcaacgagcagcaggtcaagctgggctgggctattattaccgcgcgcagcggcggcacgccgctgttcttcagccgtccgaagggcagcagcacctccgaccagtggggcgacaacctcatcggcgcggccggcagtgacctgtacaaggacccggaggtggccgcggtcaacagcttccgcaatacgatggccgggcttgatgaaacgctgtcgaatccaaacggcaatacaaaggccgttatgattgaacgcggcaaccgcggcgccgtcattgtgagcgcggacagcgaaccgcttgaggtagacacgaaaacaaagcttgccgacggcgtttattacgacaaggtgacgaacgatgagtttaccgtacaggccggcaggcttaccggtacggtagccggtgggcgtgttgtcgtcctgacaaacgaaaaaacggagctgcctccttatatggcggtttcaaaggaaagcggctcgttccgcgggacgcttgcgctttcgattaatgtgctcgccgcggatgaggcttattaccagcttgacggcggggaaaaggtgccgtttacaaaaagcgcggtcgttttgcttggcgaaaacatgaacgagggcgattcggtcacggttacagtcggcgcgaagaacgagttcggctcgatagaagagcgctatacatataaaaagctttcctatccggtgctggagggaaagacggtcgcctattttgacaacgcgcagggctgggaggatgtaaaaatttacgcctatggcggcggcgcgcagggcgatatcacaaaatggccgggcgtgcctatgcaggatttgggcagcggcatgtttgcctatgagctccccgaaggctttggcggctgtaaggtcatgtttaacggaaacgacggctcggtgcagtatccggggcacaacgaggcaggcctcgatatagagccggatacttggatgtactgccacgacggcgtctgggaggattataagcagtatgtcagcggcgatacacctcctgaaaggaagcttggcgacgtaaccggggacgggaacatcaatcttcaggacgtgctggagatacagaagcatctcgccgggattcttgtcctcagtgaggagcagattaccgccggcgacgtcaatttcagcggaaagctggagttaagcgacgtattggagatacaaaagtatattgcgcatatcatcgacgggttccagcgggcttagagggcatcggcggcaagaaatacagtggcttttcttcacaaaaggaaagccgctgttttttaagcagtataatattaataatttgaaataaggggtgctggaatgaaaagaaaaatattatttaaaagcgctgtgatgttgctgtccctgctgctggtggttccgacaattgtgtccgtttccgccgaggaagacgggtcttggctggaatatgcggttttgaacagcaacacggtagcggtaacaggatgtaaagacaatcgaagcgaattgattattccttctgaaattaatggcaggaaagtagttgaaatttcagactttgctttttttgaacaaaaaaatattgaaaccgtaataatccccccgtcagtgaccaaaatcggctcatatgtgttaaacggcagcggtttaaaaaagctgactgttccggacagtgtggttgaaattggaacgtacgctttcatgaataccccatggtaccgatacagcggagattttgttattttgggtgacggcctgctgctgtattaccaggggaatcaaacggagatatcgcttccagaaaatgtaaaaagggtttcagagggcgcttttgccggaagcgtggtgaaaaaggtcgaaatgccggaaggagtagaagaaataggccgcagggcatttgaaggggccgcttcgttagaagaggtaatacttccggaaagtcttaaaaaaataggcgcccaggcgtttaataactgtcaaaagcttaaaattatgacaattccccagaatgtaactgaaataggagaagaggcgttttcaaattgtaagctgatacgtaccgttacactgcccggcagtatagcaacgcttggcaagtcggtattttctggctgtacaggccttaaaaaagctgtgctgccggagaacatgaaagaggtgaacagccagctttttctcggctgtactacgcttttagaggtcaacataccctccggtgttacaaaaatcgaaaattccgcgtttaaaggatgtacatacctgtcagaggttactctgcctgaaggactgctaaccatcggctacgaggcattttctggcagcgggctaaggacagtccgtgttccggacagtgtacagtttatcgacataagcgctttttccaatactccttggctacaaaacgagagcgaagaatttgtaattttgggcgatggcattctttatcagtaccgcggctccggcggaaatgtggaaataccggataacgttaaaaccatcggccagagcgtttttcaggggaaaacagtttccggaataacaattcctgacagtgttacatctatccaggccatggcgttcgagagctgtactggcgcaggggaaatcattattccggcgggagtttcacaaatgtcaaacgcatttcaaaacagcgggtttaaaaaagtttcaattctaggggatattgagcagataatgccgttttgtttctatggctgttataacctggaggaaattgagatttccgggcgcattaaaacaattggaagaaatgcgtttgtttcctgtataaaactgcggacggttaatttgcctgaggatttgacttgtattgaggagaatgcttttcaattctgctccatgctggaaaaaatcaaaattccgtcaaagacgttggaaataggggagtgtgcattttcatactgtacggggctgcagcaggttgtgtttgaaaaaggaataaagataataggggaggaggccttttttagctgtacgggattaaaaaatttacgccttcccgatagcctggaaacaatatcggtacgtgcctttgcgtactgcaccacgctgaaaacccttgagataccgaaaaatgttgtaaccgtaggctcagaagcttttctattctgcgatcagctcgggaaggtgaaaattcccaggcaagttaaggaaatcggagaccgggcatttggttatttgagcgtcccttccatgactgtgctgacaatatatgggtatcaagattcagaagctgaaagatatgcgatagacaacggcttcttttttgaaacccctcacggggatattgacggagaagggacaatatctatagccgacgttttaatggtccagaagcatctttctaaagtgatagatttaacaaaggagcagttgaaagctgccgatacggacgaaaatggaaaaataacgctgaatgacgtgttgataattcagaaatatattgcaaaaattatagattttatttagcacggcaaaaataaatacaaaaagccctgcaaagcttatggctttgcagggcttttacattgcggaggtcaaccactggctgagccagtggagataaaaaagcttcagctatggacaaaaaagaaactccccgatagattaaagttaaggtctgccaacctaactcaaaatattgaggaggtcttttctatgacttccatccacttggcgtaagtcattttttcttcatacttctttatggctcactgcctcttcggcgggcttcttttatcgaaacttacttaaaaacggaagtggaataaaggctttacgcattccgggaaacctgacgccccagcgcttacagtaggttttaatcctaagcttccagaaagatttcgaatcccactggcctttccataacattgcttctgaaaggcagtggattgtatcaaaaaaatcgctgagctgttctgatttattttctgaatttaaaagaagagcgtggttgaataattctaggaaaacaggccggaattccgatattttttgcgcgttgtctgtcggtcgattatctttccggatagaaaagctccaatcttgacctttcttgaattcctcaaaggattcataatgttttggccaattttccaaaaatatttctataaattcgtcatagctccagtctttcatccggcgggaatagaatttttttaaatcttttaagagacggttcacatctattttttcaaggtcgaaccgtatataggcaaatacagaggttgttataactaatatttttgaaatatccaaggcattactcataaaggtcgttctcacttattaaaaaattaaattttatcctttttatactctgctatatcctctagcctgcaatttaaaatgctacataatttatttaaagttttcgtttcaacattttcattggctttcaaccgcctaatcgttttgttatcgatattgcatttctctctaagcatgtatgtagacattccttttttactcatagtctcccacaatttatcaaatacaatcacttttttatcccccaatcttgacatttattattatgggggttataatcctgtttattaaggggatataatccccataaaaaatttgattaaggatttggagtctaaaatgaaaaagtatgaaattgtattgtctgatgacctttcacatatatacgaagatattgcaaagatgaataaaatgaaggtagagaagtgccttactataatactggataaggttatttacacaatgctccattcaccaggaaccggtaataagccataagatatacggtaatagcaacaggcgggtaaacaataataggttcacctgcctgtttggcgtaatattacgatttattttcttttgcggtgcggcaggaagcaatcagcacaacgcgaatcgttatacaatcgtcactgagttttttatatcgtatttcgtcaatataattcgtgcgataaagcagttccagccaatagcctgtttcgcttgcctctttcagggcaatctccagtttagaaagaaagtcgttcctgctttgcgcgtaatttgcttttatgataaggcaaaagtttgagttttttcatgatgtatcgccttacggcgaaatgatggattgctttgaaaaatgatgtgccttcacttcgctgcggcatgatgtgatgtttgcctttatgtcccgcaggacacatcattgccgaaggcagcatcattctaaaaaaagccttttttgtctttttgacaaaaaaggcttttttagtggagctgataggcagattcgaactgccgacctcatccttaccaaggatgcgctctgccgactgagctataccagcattggcaggggcagaaggacttgaaccctcggcacgtggttttggagaccactgctctaccaactgagctatacccctgtatcagcgccgcatggtttcgcggcgcaggtattataatatcattttgtaaagtacgtgtcaatatgtttttgtaaaaaacggcgaattttgatggcaggaagcagcgtacccgatacctgcgctgcgacggtcagccgccctgcgtttcctttagaatatcagcaataacctcgcgttcgtccagatggtgtttaaccccgcggatttcctggtaatcctcgtggcctttcccggcaagcacgacgatgtctccgggctttgccgttttcatacagtaacggatggcttctctgcggtcgggaatgacgatgtatttcccgtttgttttatggatacccgtttcaatgtctttgatgatatccatcacgttttcaaagcgcgaattgtccgcagtcaaaacggaaaggtcggaaagcttcccggagatttcacccatttcgtagcggcggattttcgggcggttgccgcccgcgccgaacagtgtaatcaaacggttgggcttgtattcgcgcagggtcgtaagcacgttttccatactgaccgcgttgtgggcgtaatctatcagcagcgtatagccgccgggtacctttacaggctcgacacggcccttgacggtcgcttcgtccagcccggcgataatcgcctgttcgggtatatcgaagtgccggcatacggcgattgccgcaagcgcgttgtaaacgctgaaccggccgggtatcgggacatttgcattcagctctaaaacgccgcttgtgctgaaatgcacgcccaggtaaccggggcgcgacaccagaccctcgtcataagcgcgcagctgcgcgcgctcgtcaaagccgtaggtttctaccgagcaggtgtgatttgttaatatgctttcccactgggggtcgtcgcagtttacaatccctgttttgcactggcggaacaggagggacttacaggccaggtactcctccgcgctttcgtgctcagccgggccgatgtggtcgtgggaaaaattcgtaaacacgccgtagtcgaaaacctgcccgtctgtgcggtgccatttaagccccagggaggaggcctcgataaccatgcatttgcagccgctgtccgccatcaggcgcatggcacgctggatttcgtacgattccggcgtggtgttgttcgttttaatgatttcatcgccaatcacaataccaagggttccgatggtacccgttttgattccgcccttttccaatatgaagcgaatcatgcaggccgtcgtcgttttacccttggtaccagtcagggcaatggttttcagcgcctttgcaggatgtccgaaatacgcggccgacatgtacgcgagagctacgcgcgtgtcgtccgttttgataaccgcaacggattccggaagggggatttcgtcacttaaaacgattgccgccgcgcctttttttgccgcctccgccgcgtatttgtgcccgtctgtttcaaagcccttgaggcagacgaacgcgcagcccggcacggccttcctggaatcgtatactacgtcggaaatgtccgggtcgccggttccctgtatacggacagactggatttcctccagtaatcggctcagcttcattgtggtccctccaaaaaaattctgaaagcgcggcggaaaaatggtacaacctgtgctttttttcacggcgccggaatatatttgttcatatacgctaaatttacaacatcatatggcggctgtcaatcgaattatgcccactgcccgtaggataatcgaacttttttgtgtattttacaataaaaaaagaaagaaaaatgaaataacaagattattatactcctgaaagaattataaaacaagcggtgacaagggatttttaaatgcgatgaaagaaaataaaaaagcttattagggaaaatgtacaaattgtttttgtttattttgctgtaaaaagacgtaaaatggatttatttttttattttcaggaaaatttgtgtacatttagcacaaaacgagaagcgaattatatcgatgttaataaaaataaataaaggcagttgcaataaataggttgctatgctattatttactcagtgacttgggcgtgtttctgcgttgattgcagttttttcgcgcaagacggacctggaacgtgtcctcacataacacaaggggtgcttgtgttaaattttttactacataagaaagaaggaaacaaaatgttcagcaaatccaaaagaattgttggaatcgtgctggccgccctgatggttgcatcggtatttgccggctgcggcgacaacaacagctcttcaacccccgcttcaggctcgggagatgcaagcggtacgtcctcacagcagcagatcaagaatattacggtagatgagatgatggccgacgcgcaggtcgccatgggcgatgaagataacgtcaagctaaaggtctggggcccgcaggactctgtcgcgcttctcacaaagcagtgccaggcttttgcagacaacttcaagaagctcggcaggaaaattgacattgaagtcgttccgcagggcgagagcaacgcctcttcccaggttatgaccgacccggacgctgcggcggacgttttcggttttgcaagcgaccagggccttgcgctctttaaggacgaatacctcctgaaggtaaggctgaacttcgtacagccgattaaagacacgaacattacagaagcggtcgataccgcgacgttccagacagcgaacgacgaccagccgtacctgtacgcttacccggaaacgggcgacaacggctacgcgctgttctatgataagagagtcctcagtgaggaagacgtcaagacgctcgaaggcattatgcaggtctgcgaggagcagaaaaagaacttcacgatggagatgggcgacggctactatggctgcgttatcccctttacgggcggcggcacgctggagcttgaggacgacctcgagacccagaagctcaactacgattatgagaaaatcggcccggtcgctaaggcctttgcagacgttctgagcacaagcaagtacttcaagaacgaatccgttaactccacactcgtatccggcttcaagaaccagacccacgccgcaggcgttatcggttcctgggcaatcaaagatattaagaaggcgctcggcgacaatatgggcgttgcaaagattccgaccattaaggttgacggcaaagatacgcagatggtcagcatctacggctacaagaacatcggcgtcaacgcaaagtcgaagttcccgatgaccgctcagtcccttgcttactacctcactggcgaaacatgccagaagcagagagtcgaagaaatcggctggggcccgtccattaagacccttgttgattccgagctcgtaacgaaggacgaggcgctcagcgcaatctacgagcagcagaaatattcactcccccagaaagacatcatcagcggctggtggtccccgacgggaacctacggcgcttatgtcgtagactccaagaagcagcatgacgacaagaccatgaaggaagaatttgacaacatggttgaaaccatcgaaatgggttaagcgcttcccggaacaattaatcagtattctgtttacaagcagccctacccgggctgcttgtaaaaacgaattaagcacagcgttttatacataaaaacatttcaagtgccttgcacttgttatattttatacaaaggggagtgaagccatgagatacatcgattacgtccagctgaatcctttccaaaagctagggtacaacctgaagacatttttcgtgaatctcccgaaaaatgttgccaggttctttaagttcctgggacgtaagatcgcggcgttcttctgcgcaatcggcagaggattcaagaattatggaattggttttgtcaagggagattggagtacgaaggtttcttatttgataatgggaaccggctgcatgttcaagggacagatcatcaagggcctgctgtatttggctgttgaggtcggctatatattctatatggtctcgtttgcgtggcagtacctgtccaaattcttcacgctcggtacaacggcggtagtaagggaaatggactacaataccggcattgagacagtccacgcgggcgataactccatgctgattcttttgtacagcgttatggcaatctttattacagttggattctttgcgctgtatatttccaacattaaacaatctttaaagctccaggaattaaagagcaagggcaaaaagcctttcacttttattgaagacgtaaagaacctgcttgaccagcgtttccatgtaacgctgctttcccttccgaccatcctggtatgtatctttacggtgcttcccctaatctttatgatcctgattgctttcacaaactatgacagcgcgcaccagccgccgtcgaagctctttgagtggattggcttcggaaacttcgcggacgtgttctttgatgaaccgagaaaggcgctcaccttccagaatctggttgtctggacgctgatttgggcggtgctcgcaactgtaacaaactacatattcggtatgattttcgcattgatgatcaataagaagggcattaaattcaaatccttcttccgtacaatgtttgttatgacggtcgcggtcccgcagttcgttaccctgctcctgatgggccaaatcctgtcggagggcggcgtcatgaacgttctgctgcagcagctggggctgatatccgagccggtacgctttttgaccgacccttggcttgcgaagattacagtcgtcgtcgtaaacatgtggatcggtattccttatacgattttgattacaagcggtattttgatgaacattccggaggagctgtatgaaagcgccaaaattgacggcgccggccccgttacgacattcttcaagattaccatgccgtacatgcttttcgttacgactccgtacctgattacgcagtttgtcggcaatatcaacaacttcaatgtcatttacttcttgacaggcggcggcccaatgaacagccactactacaacgcgggcgacaccgacctgcttgtcacatggctctataagctgaccatggataagaacgactacagccttgcggcgacgataggtatcctcgtattcgtaatatgcgcgacggtctcgcttctcaccttcaacctgtcgaagtcttcaaggaatgaggaggagttctcatgataaaaagctataaattaagaagacatgtttcaaacgcgcttatttacgttatcctttccgtatgcgccgttatatgggttatgccccttttatggctggtcatgacctccttccgtggagagacaagcgtttacatcccttacatcattcctaaggaatggacgttcgacaactatattaagctgtttacggacacatcggtcatcaactatccgcgctggttcctgaatacgtttgtcgtagcgatatgctcctgcatcatctcaacaatatctgttttgatggtcagctacgccttcagccgcctgcgtttcaagtctcgtaaaaagtttttgaatgtcggcatgatcctcggtatgttccccggatttatgaccatgattgcggtttattacctgctcaaggcaatgggacttacccagaaccttgttgcgctgattatcgtatattccgcgggcgcggcgctcggttactttattgcaaagggcttcttcgacaccataccacgagcgctggacgaagcggccacaatcgacggcgcaaccaaaaaccagattttctggaagattattttgccaatgtcgaagccaatcgtcgtttatacggtgcttacttcgttcaccggcccgtgggcggactttattctcgccaggattatcatgggcgacagcatcgacaactatacgatagcgctcggactttggacgatggtcgataagcagtacatcaactcgtacttcctcaatttctgcgcgggtgcggttgtcatcgcgattccgattacaatcctgttcctcaagatgcagaagtactacgtcgagggcgttacaggcggtgctgtaaaaggctaagctcaattacataatggcagaggcggcgggacttttgtccctcacccctgccatttttttaaaggagaatcaatgtgggaaaaaaatttatttctattctgattatttgctgtattgctgctgccgcggtgttcagcgggtgcagcccggacacggggcaggagatgaaagcggcagcgtcgcaggataagtacaggaattattatgagattttcgtgtcgtcgttctgcgattccaatggggacggaatcggcgatataggcggtattatatcaaagctcgattatttaaacgacggcgacccgaattccggcgacgatttgggaattgacggaatctggctgatgccgattatgccctccccgtcttaccataagtacgacgtgaccgattattacgatatcgacccgcaatatgggacaatggaggattttgaaaagcttattgcggaatgcgacaagagggggatcgatgttatcatcgatttggtcattaaccatacgtcgagcgagcacccgtggttcaagaaggcgaaggcggagattgcgcagggtaacctggacggctacgcaaagctttacagcatcgcggccccgggagagcgcgacaccaaatacggctatcaatttattacgggaaccaaatattcatttgaatgcaatttttccggcggaatgccggatttagacctcagcagcgaccagacccgtgatgaaatcaaaaaaattatgcagttctggattgataagggagttgccggattccggcttgacgcggtcaaattttttgattctccaaacacggagcgcgtagaatttatgaactggatgtacagtacggcaaaggaaatgaaggaagacgtctatatggtcggagaggactgggacggcaacagtgcgattgcaacgagctatgagagcggggtagacagcttctttaactttacgttttccgcgtcgggcggcaaaatcaattccgcaattaactcgaaaaatgcaaaatctatcctgaaatccgaccagaaatggaacgaaattataaaaggcaggaatgaaaacggaatcgacgcggtgtttctctccaaccatgacatgaagcgcagcgcggctgcattcagcggcgatttggtcaaaatgaagacggcggcgtcgctttatatgatgatgccgggcaattctttcatttattatggagaggagcttgggctgctttccggcgaaaacgacgcttcctaccgtatccctatcccgtggtcgtacgacggggacaaaagcggtaccgtaacggagcttccgccgggcgttgtggaagagcagctccccgaatggaatcccaaggaaagcgcgcaggagcagcagaaggatgcaaattctttgttcagccactatcagaatattataaggattaagctccagaaccccgaaattgcgaggggcaccatcaaaaaaattgtggaaacggagattgggaacgttgcaggctttattaccgaatacgacggttccacgctgatggtcgtgcataaccttggcgaagaggagcgcacggtggaaatcccgaaggatgactttaattattcgggcatacgtacacagcttacagcgctcgaccccacgggagaagacggccaggggaacgccatatatccgcaggcaaagctcgacgggacgacactgacaattcctgcaaggtcctttgtaattcttaagtgatataaattcgtctttgtgcggatgttaaaaagcttgagccggtattgcttttcagggcaatgccggctcattttgttgggcatttatctcagaaggctggacggtttgcgtttcaggctccgcagataggctttgtcttcattgctcacacggtaggattcgcagcatttctgaatggtcttgttatgcgtaaaatcgtcgagccttccgtccagcaggacgggaagcgccgactccctggcctttacaaaacatacggaaagcgcccaggcgacagccattttaacataatatccgtcgtggcgtatcccgcacagcgtttgaatggtatcctccgtatatggcggctgtataaaataatccatcagcatcacggcgcaaaaccgcagttcaaattccctgccgctttggagtacgccgcttagaaattcccttaccttaggcaaatccttgcgaaccgccttcaaatcgccgcagaaaatgtcacaaaccgaccagttcctgatttttggtataaacccgctgataaagcgcagccgcgtttcaatatcgcatttcatcgcgccgattaccatagcctgcagcatggtttcttccagcgtatcatccctagcaagcgctaaaaactccatgggtgcatctgccgctatttttttcgccagctttctcagctgcggaatacgcaccccgtatgcgctcgtttcccctggaatcaggctcaaattgaatttgcgataagcttcgtctgacatttctttgagggcctcaagtaattttagataatctttttgcgtaaatgacatgtaatattctctcttttcaataaatttaaaattttcgtgacgctatcattttatcataaagaagaaatttaataaatatggatggaataaatcgggaaaggaaaccgttttataggaaaagcaacaaaacaaacgttcttgaaattttgtgtatatttacatttatatatgcacatttttgttttaagattattgatttttcatcaaattatgatgtaataagactgaaatataagaacctgattgggtaaaggatttttttacaggtttataatggtaaaatggagaaggttacgaatgtatttaaaggtaaaacgtatgttaggggtctttctgtcatttttgggcctgacagtcgtatcgcccgtacttttggcgacggcgattgccattaaagcggaatcccgcgggccggttatttttaagcagaaaagaatcggcaaggatggtaaggtttttgaaatttataaattccgttcgatgtgtgtcggtgctgaaaagacaggaagcggcgtttattcgggcaagaacgacgcaagggttacgaaggtcggccggtttatcagggcgacaagtattgacgagcttccacagtttgtcaatatcctcaagggtgaaatgagcataatcgggccgcgtcccgttcttacataccatccttggccgtacagcgactatacgcagcggcagaagaaacggtttgacgtccgcccgggcgttacaggatgggcgcaggtgaacggccgcaaggagctgccatgggaaaagcggcttgaatatgacgtggaatatgtagagcatctttcctttgcgtttgacgttaagatattttttaaaacggccgcgaaggtttttaccaacgcggacaatgtcaatacggcgcagacggcgcctgccggctgtgtgcagcttcatcaggatgatgatacggtaaaggagagtgcggtgaaataatgccacttaaactgatgtatatcaccaatcgtccggaaattgccgcgattgcggacagcaacggtgtagataggatttttctcgatttagagctgatagggaaagaagagcggcagggacatttggatacggtaatttccaggcacagtatcagtgatatcgtgcctttaaagtcatgcctgaataacgcgcagctgcttgtccggaccaacccgatccatgacggttccaaagaggaaatcgacagagtgaccgcgggcggcccggatattgttatgcttcccttttttaagacaaaggaagaggtccgccggtttttaagctatgtagacggcagggcgcggacttgcctgctgttcgaaacgccgcaggcggtcgagcaggcggatgaaatcctggagcttgacgggatagacgaggtttatatcggcctgaacgacctgcatttaggctaccgcctgaaatttatgttcgagcttttgacaaacggtatggttgacagcctttgccataaattccgtgagaagggaatcccctatgggtttggagggattgcgagcttagggcagggccttctgccgtctgagcatgttatcgcggagcattaccggctgggctctactatagcaatcctgtccagaagcttttgcaataccgataaaatgacggatttaaatgagataaataaactgttccttttgggaatccgggacatccgggaatatgaaaaccatcttttaggcgccaatgaaacctttttcgccaacaaccataagtcggtggaacaaattgtgaaaaaggtagtcgatttaaaaagcttgggggagtaagaaatgattagggatatgctggagcagagaaaagacctgcaggaaaatctttttattagaggttttttcatttcagataagctgccggagcgactggaggaatttccgttttacggaaattggaaaacacagcggcacggcggctattattttttaatacataaaaagcaaaacctgttcactgcccgccgtggggacgatattttctttcttgccggacatgcgtataatccctttaccatggaaatcgatgaaaccaggattttagagcggattgcagaagcttttggtaaatcgcaggctgatttttatgatgccgtcgatgaattgacagggctgttcctgtttggctttatatctggtaatcaaatcagctttcttatcgacccgtcggggatgcagtcgggctgctatggcagaataggggatgcgttttatatttcctcccatccccaactgattgcggacgtctgcgggcttgagatggattcttttgtaaaggagcttgtttcctacaagtggtataacagggtaatgggcccgtatctcccgggcgatttgacgccttttgcaggggtaaagaggattgtacccaacatttcctatacctatggggctggggaagtaaagcatttccgcttttatccaagaaaagagctttcagtctgtaaaacagaggaagaatacgggaaaacaatcaaagaagctgctgatatcctgaaaaacaatatgcacctgatttcaaaaaaatgggagcatccgcagatttctttgaccggcggcatcgacagcaacacaacgtttgccgcggcaaacgggttttacgataaatttgaggcgttcagctatctgtcggcgcccaaggaggctccggacgctgaggccgccaaaaaaattgcggataaatttggggtgaagcatacgctttacgaggtaccccagacgtccgaggggctcggggactacgacgggctcgtcgctgttatcaagcataacaacgggtatatcgcaaatgaaaagggcaacgagctgcgcaaaagggccgtcctttacaggcagtgcccggccgacgtggaagtcaaatcgtgggtgtccgagacaatccgcggttattggtacaagcattacggcaggaagtccatgccgaagctttcgccaaagctgttccgtaacctctataaaatctttatctggaaccgcccgcttgcccataaggtcgataaagtgtttgcacagtatatcgacgagtttgaatataaaaccatccccggcgcgtacccgcccgccgatatgcattactgggaggtaacctggggcagctggggcggtatgaatatcagtgaaatgcgcctgtgcttcgatattacaatggcgtacaacaacaggaaattccttgatttgatgttcaaggtgccgctggagcgcaggatttcagaccaacaccatcttgatatgaagaaatatctcaaccgcgagctttacgatatgaatatccgtgtggtgaatctgaaagagacagatttcagggcgtttatgctgaacatcatctttacaatcaattcggttctgcccttctaaaatatacgcatcaaagcatgcgtttacggtggtgtcaaaatatgaagaaggtcctgctgacaggcgcttacccctatacaagggaacaaatcaatcaaatagaagcgcttggcgtccaggctttttttgtccaggatgagcggggcggtttggaaaagggccttttgtccgccgatgcagtcgtgtgcaacggcttgttcctttaccatgacatcaaagcgtttaccggacttaagatgattcagcttacaagcgcggggctcgacagggtgccgcttgcgtatatcaaggaaaagggcatagcgctttataacgccaggggcgtatacagtataccgatggcggagtgggtcgtgctgaaaatcctggagctgtataagcattccgccggattttacagggcgcagggaaaaaaggaatggaacaaggacagaacgctgcttgagctgtacggtaaaacggcctgtattgtcggagcgggcagcatcgggcaggagacggcaaaacgccttggggccttcggggctgttgtaaccgcggtggacgccatgccggtccaaagccctttttttgacaaaacatatatggtaagcgagcttgcggcggcgctttcacagagcgatataactatcctgacccttccgctgacggaacagacgcggcatatgtttgatacggcgatgttttccaaaatgaaaaagggcagtattctcatcaatgtatcaaggggcgcggtcatcagggaagaagacctggcacaggcggttgcctgcggccatttgtccggcgcggcgctcgacgtatttgaggaggaaccgctctccatagaaagcccgctgtgggatatggagcgcgttattatcacaccgcacaacagctttgtttcggacaatacgagtaaacggcttttcggcgtgatatatgaaaacctgaaaaaacatttcatccagtaaagcggggaacagattgtgaaacgagccttgataacagcgaccgtacaaagccatgtcgcgcagttccataagcccttgatgaagctattgagggaagacgggtatgaaatacacgttgccgcgcgggacaatcttgcggaaaaaaacggtttgggcctggaatttgccgattgcgtgtatgacgtcccgttcgaccgctccccattgagcaaaaaaaatatagccgcctacaggcgcctcaaggaaattatcgacagcacggagtatgagataatcagctgcaacacgccggtcggcggagttcttacaaggctcgcggcgcaaaaagcgcgaaaaaaggggacgcgggttttttatacggcgcacggcttccatttttataaaggcgccccgcttaaatactggcttaccttttacccgctggaaaagctgcttgcacataaaaccgacgtgctcgttacggttgcgggcgaggattacacgcttgcccaggacaagatgaagacgaaagtctgccggatacacgggattggcgccaacacagaaaaatataagccgctgccgcaggaagagattgcggcaatgaaggaaaaagaggggctttccgacgcttatcctgtgctgctgtgcatcggcgagcttctcaaaaataaaaaccaggcggcggccattggcgctttggcggaggccaggaagaaatatccgcgggcaaggctgttgcttgccggtaacggcccgctcctgccggagcttaaggaaaccgtccgggagcttcatgtggaagatgctgtggattttctgggctaccggaccgatttggagcgctacatcaatatggcggacataatccttgcctgcagcttccgcgagggactgcccatgaacgtgatagaaagcatgctgtgcgcaaagcctgtcgtcgcatctgtcaacagggggcacagggagctcgttgcggacggacagaccggttatcttgtacaggcggacgacgcagccgcctttgcgcagaaggtagccgcactgctggaaagccctgaaggctaccgggctttttgtgaaaacgctttaaaaagggcggagccgtacagggataaaaacgtccttgcggagcttcgtgatatttacaggaaatgaggagcgacattatggaccaacagacactgcgcaggctgcagctgacgcagctggaaattatgaaggttgtggacaggctgtgccgtgagaacgaaataccttattccctgtacggcggtacgctgctgggcgccgtgcgccataagggctttatcccctgggacgacgacctggacatttgtatgctgcgggaggactacgaccggtttatcagtgtatggcagtcgcaggacataaaagattatcttttggagaacatcgacaccaacagcagctttacgcagtcgtttaccaaaatcaggaaacggaatactgtgtttatgcagccctttgagacgaatgtagactatcatacaggtatttttatcgacatttttccattggaccgcgtaccagaaggaaaatggagaagaaaaatgcaaatgttgaacgcctgcttttatcagctttatgtgcgcgaatacccggacaactccagcaagctgttccatttgtgcacaaaggcgcttctttctgtcacaccgaaaaggcggtaccctgaatgcacccgtttcttttttaagcggtacgcaaggtataacggggataaaacgctcggctgcgcggatttttcaattgtaaggacgatgaaaaacctgctgccgtttgatattttaaacagtacggtttttttgctgtttgaggatacggagctaatggcgtttaaagactgggatacgtccctcaggctttcttacggcgactatatgcagctgcctcctgtggaacagcgcaggccgggacacaatcccattcgtgtggaatttgaataaggaaaagtggggatgaattggtatgcaggcgattattttagcggccggtatgggcaaaaggctgaaagaactgaccgcgaacaatacaaaatgcatggtaaaggtcaacggggttacgctgattgaacggatgctccggcagcttgacgcgctgaagctcgatagaattgtaatcgttgtgggctatgagggcgaaaagctgacgcaatatgtcaatgcgctttctatcgccacgccggtggtttttgtggacaacccggtatacgataaaacgaataacatatactcgctgtcgcttgcaaaggaattccttttgcaggacgacacgcttctccttgaatccgacctcatttttgaggacgcagtgcttcataagctgctcgacgacccgcggcagacgcttgcgctggtagataaatatgaaagctggatggacggtacggtcgtcacgctggacgcggacgataacatactatcctttgtgccgggcagcaaatttaattttgacgatattccgggctattacaagacggtgaacatttataaattcagcaaatatttttcccagacgcattacgtgccttttttagaggcatataccagggcattgggaaataacgagtattacgaacaggtcttaaaggtaataacgcttctggaaaagccggatatttgggccctgcggctttccggcgaggcgtggtatgaaatagacgatatccaggatttggacattgcgcagtctatttttacaacagaccccatagaaaagctgcataagatgcagagccgttacggaggctactggcgctatccgggaatgctggatttttgctatttggtcaatccttatttcccgccgaagcggctgatggatgaaatcaaggcgaattttgaaacgctcatctcccagtacccctcaggaatgtatgtaaacgcgctgctcgcggcaaaagattttagtgtggcgcaggagcatatcgcagtgggcaacggcgcggcggagctgattaaagcactgcttgaaacctcccgaggcaaaatcggtataatcaagccgacttttgaagaatatccaaaccggcttccggaagaacggcttgtggtattcaacgccgatggcccggacttttcctacagcgcgcaggatgtgaaaaccttttttgaatcacgcggggtttctgacattatcctgattaaccccgacaacccatccggaaattatatcgcaaaacagcgtgtcctggagcttgcttcctgggcggagcaaaagggcgtcaggctggttgtggacgaatcgtttgtggattttgccgaggaagctgactgcagcctgatagacgaagagataatctgcgcacataaaaacctgctcgtgattaagagtatttcaaaatcctacggtgtgccgggactgcgcctgggcgtagcggtatccgccgatacggagcttatcagccggctaaaggaggaggtatccatttggaatatcaattcctttgccgagttttacatgcagattgcagaaaaatataaggcggattacgctgtttcgcttgaaaaaataaaaaaatcccgtgcgtttttgatggacgggctgcgtaaaattccatacttgcgcccaatcggctcacaggccaactacattatgtgcgagctgactggagcctatacgccccgggagctgtccgcaaagctgctgtctgaatacggtatcatcataaaggacttgtcgcctaaattgggccaaaggccatatatccggcttgcggtgcgggacataaacgacaatcaggcgcttttaagcgcactgagggagcttgaaaagtaagcaggccgtttcctcaaaagagagggaaaacaaagatggactggaaaccatccgctgttgaagcagcgccggatttgttgtaaaataaagaagtatattttcgcggtttgcgccgcatttaagaggagacacaatatgcagcagccaatcagggttttacatatgctggcttctatgaaccgcggcggcgcggaagcaatgattatgaattactataggcacatagacaggagcagggtacagttcgatttcctgctgactacgcctggccaatatgattatgaggaagagataacacagcttggcggcaggatttaccgcgccgcgccgctgacaaaaagccgtccgcaggattatatgaaggctgtggacaaatttttcaaagagaatccgcagtaccggattgtacattcccatacctcgagcaaaagcttttttccgctgcgcctggcaaaaaagaacgggattcccgtaaggattgcgcattcgcacagctctaaggcggaagagggaatcaacggaattatccgcagggcgctgcgctttcctttgcgcactgtggcgacggacttcttttcctgcggggacgaggcttccgtttacctttatggtgaaaaaatcgcaagggaaaaagccattgtagtcccaaacgccatcgatgcgcagcaataccggtacgacgccgggcaggcgcgggatatacggaggagcctggggataggcgaccagcttgtaatcgggcatgtagggcgtttttttcctgtaaagaaccacatgtttttacttgatacattttatgcgctcaaacagcttcatcccaacagccgcctgcttctggttggcgatggggagctgaaagaaacagtccaggatagggcgcgtgagcttggtatagggcaggaagttatttttacaggcgtgcgcggcgacgtaccggagcttttgaaggccatggatgtatttgtattcccatccctcaacgaggggataccagtcgtcatgattgaagcgcaggctgctggcctcaaatgttttatgtctgacagtatcccatcacaatgtgtaattacgcagaacgtgaagagccttgcgctttcgcagacgccggaatattgggcgcgggaaatcctgcgtgtaaaagacggctatgaacgccgcgatatgtgcccagaggtggaaagagctggcttcgatatcaggaaaaatgcaaaatggctggaggagttttatctgcatgcatacaccggtaaccctgaatgaaaaaacgagctatgcggtatccgtcatccgggtgttcgcagcgcttttaatctttttatgccatgcagtgcagctctttgacagcgcgctgcttcaaatgagcggccaggtttttaatgtgggcgttcccttgtttatgatgatttccggattcctgttcgcagtaaaggggaagccggaatcataccgctcctggtttggtaaccggctgctccgcattttaacgccgtattatttgttcctgctgtttttgctgctggtttatgtggtgcgcttcggctggcaatcaatcataccggaaaagtggattttctatgtactgcccctgcagggctttactcaaaattatataaacggcgcggaacacctctggtttgtaaccgatattttgctttgttacctgcttacaccgctattatatgtcatacaaggaaaaatcagcaaaaggcagggtgtatggctgcctgttgtgtttttgctgtacacagccgccctgctgctatcgtcgtatttattgccggcgattgtaagcactacaatcgtcacagtgttctcttatatactgggttttttatttataaaagccctgctgtcccggcgctgtattgtttttatcgttatgctggctgcatctcccgctttgcggctggtatcaaacctgttttttgacggaacgccgctttacgaccggtttatcgcaccggtaacgcaccagcttctcgcggtttctcttttttgccttctttttattgcggtaagcaggtggtttgattcgctgctgcgggtaaggaaagcggtgcggtcccttgactctgtctcgtatgagatttatctggttcattatatgtttattatcggaccgcttgcggtttcggttttccaactaagcgtattgaattttcttattttaatactgctgacagccgcggccgctgtggccttacatgctctttccgggggcgttttaaaacggctcagaaaaaggcaatgagacgcaagctgctgaaaccgcagccaaacataaatgtaaaacaaacgaaaatcaaaggaggagtacctttggaaagcctgacggtatttacgccaacatacaaccggtcgcatactttgggcagaacttataaaagcctttgtgagcagtcaaataaggattttgtctggctaattatagacgacggctccaccgaccatacaagacagctcgtagagcagtggcagcgtgaagactgcggtttccgaattgagtatttctatcaggagaacggcgggatgcacgccgcgcataatacggcttatgagcatatagagacgccgcttaacgtatgcatcgattccgacgacgccatggcgccgggcgcggtggaaaaaatcctttccttctggaatgcaaagggaagcgatatttatgccggtattattgcgcttgatgcggattttgaaaacaacgtgattggcaaagacctcggagcgctcagggaaacgaccgtcagcgggtattacagcgcgggcggtgcgggagataaaaagctgatttaccgaacggagctgataaaacgctatccgccttatcccgtatacaagggggaaaagtatttttccctttcttataaatatttgctgtgcgaccaggattataagatgctcgtactcaatgatattgtgtgcaacgtcgagtatcagccgaacggttcttccagcacaatgctttcccagtacaggaataacccgaacggctggacggactggcgcaaaattaaaatgaaatattcagcaaacaaaaaggcgaagtttaaaaactgcatccattatgtctccagcgcttttatggcgcataggaagcgctttattaaggaatcgccggaaaaagcgcttacccttcttgcgctgcccttcggtttggcgcttaatttgtacattaaaatgaaaaccagataaaacaggagattataatatgccgatttactggtccatactgggcgttacggcctttttgggggtgctttcctactatttcccaaggccgcagtcaaaattgaatacagacagcggccagagcaccaggctttttttcgccctttttatattcggctatattatcctggtctgcggcctgcgcagtgatattgccgacacccccgtatatgttgataatttcaacggaagaaccggagtgttcagcaatattgacatggaacaaaagggttggggcttttggtttttatcagatgtttttaaaacggtgatatcgtcggattcccaggtttggctgtttgtcattgccgccgtaagcgggctttgcgtcctgcgtacgatgtataagcactctgtcgatttcccgctcacggtttttatttttgtcgcaacgaacacatacctatggatgattaacggaattcgccagtttttggcggccgccatcctgtttgctttctcagactggctgtttcaaaagaaatcagtgcggtatttaatcctgattttgcttttgtccaccatccataactcggttttaatcatgataccaatctattttgttgtcatatcccgcccgctctggaataagaaaattatcttttttattgccgtgatactgggctgcgtactgtttgcaaaccagtttaccgattttttcgcagaggtaacgggctatggaagcaacgtgctggaaacggggggctccaattttatgcgtgtgctggtctccgcggttccggttgtgctcgccttttggaagcgaaaacagattaaggaactcgattcgcccattatggacatctgtatcaacatgtcggtcgtaacgacatgcttttatctgctttcctcctttaccagcggaatctatatcggcagaatccccatctatttcacaatgtacggcatgctgcttctgccatggctgttacagaaggtttttgacaggaaagaacgcgcggtgctgtatgcgttgtgtgtaatctgctatgttttctattttatggtggatacggcgggcctggactaccacagccgcatattgaatttgtaaagcggcggcatggcctttaccgcatagcaggaggaattgtatatgaaagagtatttgattatgttcctttccctgttcaggctggcagggaaaaaaatcaggcacggaaaaaatctccaggccgcgccagtccagcgcatttcacccggcgcgcgcttttttatgaaaaagggggcccatgccgtgctgggctataacggctgcttcagccgcagcggaaatatttttgtaggggaacagggtagccttatactgggcagccgggtatattttaacgtaaacgcttacatcagctgccaaaacagtattacggtgggagacaactgcatatttggccccaatgttacggttatagacaataaccatgcgtattccaaagagaagggcgtcagtacaagccttcatagctgtggggaaatttccatcggaaacaatagctgggtcggcgcaaacgccgtaattttgaaggatacgcagataggaaacaactgtgtaatcggcgccggctgtgtaatcaagggtgtaattccggacggctccatcgttacgcaggacaggcggctgcgcgtaaaagagatgcaatgacgccgcgggggaggacggttcatgaaaaagattctggttaccatgacgtcgatgcacatcggcggggcggaaagaagcctgattggcctgctcagcgcgattgattatacaaagtatgaggtagatttgctcctttacaggcacgagggggagttcctgccctttcttccaaagaaagtccgtctgctgccttatttgccgcagtacgacacgctcgaccggccaatcgttcagcttttacgcagcaaacgttttttattcggcctggcaaggctttttgcaaaggtgaaaaccaggctgtattgtaaaacgcatcatatagaaaaaaccgtctgggtcgctttgcagaacaatacgcgctgcgttttgccgctgctccccaaaatcaagggggagtatgatcttgctatcggatttcttgggatacacgatatccttataaaaaaggtgacggcaaaggtaaagctcggctggattcatacggattacagcaagctttcccccaatccgaaaatggacaggcaggtatacggccgccttgactatatcgtcaatgtatcgcaggaatgcaccaatatttttttaaagcagtatccgcaatataaaatgaaggctgttacggtggaaaatatcctttcccccgaatttatccgcgaacaggcagcgatggaggacgtttccgcagagctcgacaataaagacggctgtaaaaccatttgttctgtcgggcgttttaccagcgaaaaaaactttgataatgttcctgccatatgtaagcttatgctcgaaaagggctgtaaagtcaggtggtacattatcggttacggtacggatgagcagctcatcaaggaaaagattaggcaatttgggatggaagggcatgtaatcctgctcgggaaaaaaaccaatccgtatccatatataaaacactgtgatttatacgcccagccgtcacgcgcggaaggaaaggctgttacggtcagggaagcgcagattcttggcaggccggttgcggttaccgctttttctacggcgaaaagccagctcaacgacggccatgacggcgtaattgttcccatggacaacgaaggctgcgcccaggcgcttggaaggcttctttgtgatacgcggcgcatgcaggcactcagtgataattgtgcgcatacagattacagcaaccgttcagagctggaaaaaatttatcgtttagcggggtttttgccatgattccgaaaataatccattattgctggtttggcggaacagggatgccggagaagcttataaaatgcttggactcctggaagagatatctgccggaatatacgattatgcgctgggatgagcaaagcttcgacgtcaataccaatgcctataccaggcaggcctatgcgcacaaaaaatacgcgtttgtcagcgacgtcgcccgcatcaaagcgctcagggaatatggcggtatttatatggatacggacgtcgaggtgttccagccctttgacagcgtgctgcaccaccgctgcgttttagggtttgaataccgcaactgggtggcaacaagctttatagcgtgtgaaaagaaccacagtattttaaagctgtttgagaaggaatatgacggggcttcttttgaaacagaggacggcggcgtcaatatgacaacaaacgtagagcgccttaccgcgcttttagaggagatgggccttgtccgcgacaacacctaccaggtactgccggaaggtatcgcggtttttccgaaggaatatttctctccctatgattatggcaactgcattatggaaaaaacagaaaattccatctgcgcccatcatttttacgcgacgtggctgccatggaaaacaaagatgaaaaagctggttaagaaggctgttactgccggaatcggcaaaaagaacctggtcgcgctgcgcaacaggctgcggcatcagcacgaagaagaataagggaggtggcgcaatgcccgcggtcagtgtgattgtacccgtatataacagcgaacgttttctttgcaggtgcgtcgacagcatcctgggccagaccctgcaggatatagaactgattttaattgatgacggctctatagacggcagcggcgagctttgcgatgcttacgccgacaaggacagccgggtacgtgtggtacataaagaaaatggaggcgccgcaagcgccaggaataaaggaatcgatattgcccggggcgattacgtcggctttgccgattccgacgattatattgagccggatatgtacgggcagatgtacggcgaggcgcagcaaaacggcgcgcagctgatactgtgcgacggaataagggaaaacgcgcagggcaatgcgcgttacattgggcagccgctccgggaaggctactatacaaaggagcagatgtaccgcgaatatttcccctgcttattgatgcgggaggaaattgagttcccacctacgatttcaaactgcctgtgccttgtaaagcgctcccttctggaaacgcacgcccttcggtacgacgaaggcgctaaatattgtgaggacagcctgtttggttcccagatagcctattatgcggattccttctgttacctgaagcacaaatacctttaccactactgttacaacgcttcgtctacgacccatacgctccatctcgacaagtgggacgtgtttcagcgtattatcggcttgtcacgcgcgttctttttacaggcggaggattacgatttcacgctgcagctgagcgttcaggccatttattttgcgtttaacgcgataaacgagctgcgctcgtccgatttacccgaaaaggaaaaaagggaaagaattcgtaaaatttcttcctctgaggagctgaagacggcatggaagggctttcgtatgccggaaaacatcagttttaaacttaaaataaggattttacttttaaaaaacaggctgctttgaccagtacaggagaaaatcaattgaaaaatttgctatttatcaacgggcatttgaacccgggcggctgcgaacgttccctgacagatattctgcggcatatcgattatacaaaataccatgttgacctgttgctgtttgaaggcatgggggaatatgccggcgagctccccggggaggtcaacgttatattttacgacattacgaaaacctttggctcctgcggcgcgtgtgtcaggcgggcgctcagggaacgggacggctttacgcttgcactcaggagcgttatgctgttctgtaagcttttcgggatgggttcgctgcgttttgcgcgggggctgttccggcggcttaaaaagaattacgactgcgccgtcgcatacaggccgggcttttgtaccgattttgccgcgtatgcggtaagggcggacaaaaaaataagctggtggcaccatggggcaattgagctccgcgataatgaacggcgcagcctgaggctcgcctatgatagaatggattttgtcgcggcggtgtcggaaggctgccggcagctgcttttgcatgagtttcccggtatggacggaaagcttgttaccgtaccaaatatgatcgacgcggacgaaattaaaaaaaaagcagaggaatatcaggcggatatgcatggcggcgggactatcaaaattgtaagcatcggcaggctgtcgcctgaaaaaaatatggttatttgcccggacatatgcaaaatgctgatacagcgcggatttcaggtcaaatggtatttaatcggcagcggcgcgcaggaaaaagaaatttctgataaaatagagggtgacggcctatccggcagcatgtttttgctggggagcctgtcaaacccgtacccgtatatcaaagcagccgatatctatgtccatccgtcgttagtggaatcgcaggggatatctgtgctggaggctatggcgcttgcaaggccagtggtggccgccgcgtccttaggcccggcggagtttatcaaaaacggggaaaatgggattttgacgcgtcccgcagccggcgatatctgcggcgggattataccgctgctccaacagcccccgctttgtaaccgcgtggcggagaatgcggagaaaacggcggggctgtaccgcccggaaaaagttatggcgttattttacaatttgataggaaacgcggcaaaggagtagacgtatgctgagcagattaaaaagaatttttgtaaagccgaaaagccaggtggaatatctgcgggaggcaggctgtaaaataggggaaaatgtggatttaatcaacagcaggatagacggctgccacagcttcttgattacgataggagacaatgttacgattacaaacgctacgctgcttgcacacgacgccagcacaaaaaaggcgttgggctacagcaaggtgggcagggtaactatcggaagcgacgtattcatcggcttcggcagcattgtgctgccgggtaccaaaataggaaacagggtcatagtgggtgcgggtacggtggttgcaaaagatgtgccggacaatgtagttattgcaggcaacccgtaccgcgttctttgtacgtatgacgaatatatagaaaaaaacaggcagaaaatgcagacgaatccggtgtttcataaattgttttctgataagacccagcaggaaaaggaagagatgttcacacagctcgatggaaagattggatacgacctgtaaaaaacggattcaaccgattatcagggctaaggagataaactggttatgggaaaattggttctttattcacacggcggcgcgggaaaccatggctgcgaagcgattgtaaggggtacctgcaaaatattgcagggttatgcgagcgacctcattctctactccatgcgaaaggaaatggatataaaatacggcctgcaaagctgtttgccggtggaatgccaggagcgtccgcgcagccggctgtctgtacagcgcattctggcgtcgctgctcatacgcctaaggaacgaccgctcctatgccgaaaaactgccctttaagcatttattcaagacgtatggaaagggggatattgccctttccatcggcggggataactattgctacagtggttttgagcaatatgaaattctcaatgccaactttcaaaaaaaaggggttaaaactgtattgtggggctgctcggtcgagccggatttaattggggaggagatggcccgggatttagccggatattccctgattacggcaagggaaagcatcagctatgaagcgctcaaaagggtaaacccgaacacaaggctatacccggaccctgcctttcagctggatacggtcaagcttccgctgccggaaggctttgatgaaaggaatacggtgggaatcaatatcagccctaccgtaattagctttgagcgtgacagcggcaaaacattggaggccgcggtgacgcttatccggtatatcattcaggaaactgatatgcagattgctttaattccccacgtcgtatgggggaacatggacgaccgtatcatccataagaagctgtatgagatgtttcaggataccggcagggtagttcttctggaagaccacaactgcatggagctcaagggctttatagcgcggtgccgcctgtttataggggccaggacccacgcgaccattgccgcgtattcctcgtgtgtgccgaccgttgtgctcggctattccgtcaaggcccgtggaatcgccaaagacctgtttggcacggaagagggctatgtgcttcctgtacagtcgctgcgcggcagggacaacctcgcgcaggcatttgcgtggctgctgaagaacgaagccaccatccgtgcgcgcctgcaggctgttatgccggcttattgcgcgaaggccctggatgccggaaaagaaatcgacctgttaagggagtaatttgccttgaagagaaaccagctgaaatcaggagttatgctgtcctatgtgaatcttgcgctaagcagcatcatcccgattatatatacccccattatgctgcagatgctgggtcagtccgaatacgggctttacagcctcgcgaattccgtagttggctacctgtccctgctgagctttggaataggcagtacggtggtgcgttacctgaccaaatacagggcgcagggggataaagaaggcgaacagcggatgctcggccttttcaccgctatttatggcgtgctgacattggttgtcctggctgttggtatggtctgcgcgttcaactgcgggcttatttattccgcaaagctcagcgcggaagagcttagccgtatgcagcttctgctcatcctgatgactgtcaatacagccattacgtttatgttcagcgcattttcctcagtgatattggcgcatgagcgttatatattcaaaaagctgacggaaatgcttacaaccgtactggcgccctgcctgaacctgttgatgctttttctgggctttgcctctgtcggccttgttattgcaaccacaatcatacatgtgattatgtatggcgctaatttgatttattgcctgaaggtactcaaaatcaggccgaaatttaaaaatatgccgttcggcatcatgaaagagctggtggccttttccgccttcatcttcctgggcatggttgtcgatatgctttactggtccacggataagctcattattggcgcgatgattggtaccgccgcggttgccgtatataatgtaggcgcaacgttcaatacaatcgtaacgtctatttcgtcggcaatcagcggcgtcctgacgccgcgtatcaccaatatggtgtttacaaactgtacgaaaaaagaactgacggatatttttatccgggtaggaagaatccaatatatcctggtatcctttattatttctgcttttattgtgttcggacagcaatttatactgatatgggcgggcgaagactacggacaggcataccctgtcgctcttcttacgctgatacccgtattggtgccgttgatacaaaatacggggctgagtattgtgattgcgcagaaccggcaccggttccgtgcggtcatgtatttgattatagcgctggtcaacgcggctactaccgtggttgccgttcgttattacgggattatcggcgccgcggcctgttcatgcgccgcctatgcgattggaaacggctttatcatgaattggtactactataaaaaggtcggaatcaatataccaaaattttggctcaatatcttgaaaatgagcccggtagcggtggccatgacggtcctgggactgctggcgacacagtactacaccataaattcatggggcagctttctgcttggcgccgtcgtgtatacgctgctttatatgcccctggcatattttttgatgatgaaccggtatgagaaaaacctggtaagggagccggctgtcaagctgaaaaataaattactgaaaaagggttaaacaatgctttcgataacagaaaaagacaaatgctgcggctgcggcgcatgtatggccgtttgcccgcagggctgtatcgcaatgaataaggacggggaagggtttctttatccgcaaatcgatacaaaacgctgtgttgactgcggcctgtgcgggaatacctgtcctgttttgcgtaaaccgccgtttttggcagtccaaaagacatactccgcatataaccgcgacgaagccgtccgcaggcaaagctcctccggcggcgtttttacggcgcttgcacaatatattctgagccagggcggcgcggtgttcggggcggcgtttgatgcggatttccaagtgcgccatatttgtgtagaaaaaccggaggagctttacaaactgcgttcctccaaatatatgcaaagccgtacggatggtacatacaggcgtgcgctggatattttaaaggagaaccggcctgttctttacacgggaacgccctgccagattgcggggctccgcgcttttttaaagaaggattatgaaaagctttttacacaaagcatcatctgccacggcgtaccttccccaaaaatttgggataagtaccttgcgtttgtaaacaagggggaagaggtacgcgcggtagaattccgcaataaggacgacggctggaaaaagtaccgccttaaaatcgaaaaaattggcggcggctaccgtgcaacggcccgggaagacccgtatcttcaggctttcattaaaaacttgagcctgcggccctcctgcggggcctgcgtatttaaatcgtatgaacagcctgctgacatcacgcttgcggactactggggagttgagcagctcgaaccggagctggacgacgacaaggggctgtccctgctgtttatccacagccaaaaggggaggcagctgtttgaacatgtgcaggacagcctggtctttaggccggcggacgcgcagaaggcggtggcttataaccaatcccttctgaaggcgtccgtaccccataaaaaacgggcgtacttttttgcgaatgtggattcaatcccctttgacaagctggtggaaaaatgcctccggctttccacggcggaaaagctcgggcaaaaaatcaggtataacatgcgcagaattaataacaggctgaaacggataaagaaataagacgatagtctttgggaaagtttaccctgccaacggatttctttctttttagcacattaaaaagagttaaaatggaaagagaggcggctggctgtacggaacgcttcgccaaatgagtgctttattttttatgtgcattaaatttactgtgcctgatattgggactgtcaaaggcacggtatcacggcatactttattaaggcggcggggtccgcgccgcccgggctgcttaatgaaaagctgtcacaaacaaagcggctgtcaggattaaaatatctttatcgataagggttgcttatgcaaaagaaaacatatcataaaagaagaaggcttctcattgcgtcgattattttattgatgtttggtttctgcgtgatttttgtaatcgccgaccaatggcatttgacggttgcgcattacgatgtgacgacggataaactcagccaaagcgtccggattgtcgaattggccgacctgcataataaggagttcgggcagggcaaccgcgaattggtgcaaaaggtcggcgggctgaagccggacttgatagctatgacaggagacatgaattccgatgaagacagcgacgagcaggttgtcctgccgctgattgagcagctgaaaaaaattgcgccggtttattatgtgtttggaaatcatgagctcaatcttcaggacccggatgggtttgcagaaaagatacaggcggcgggtgccgtatacctcaagaatgatatggcggaaattccggtgggggataaaaaaataacaattggcgggctttgctattatccgttttatgatgcgtttgctccggactttgataacccgcagcgttattttcttgaggatttcagcaaacagaaaaattacaagctgcttttatgccatttccccgaatattttatctggcggctcagcgaatacgatattgacctgatgctgtccgggcatacgcacggcggtgttgtgcgcgtaccgtttttcggcgggcttgtagcgccgaaccaggagggcctgtttccagaatactgcgacggctttcatacgaaaaacggctcctccattattatttcaaaggggcttggcagcaacaaatggtggattcccagaatcaataatccgccggaaattacagtagtcgatatcgggccaaaacgctgaatgtacaataaaaaaactggctgtttaataacagccagttttttttaatatggagctactggtcggactcgaaccgacgacctgcgcattacgaatgcgctgctctaccaactgagccacagtagcaaatttcaaccgccataatattatagcagtccgggttcctttcgtcaagagtgaaaactctttttttcgattattcctgaaaacgtccggtgggaagactatatttcttttctttcatttttcaggcgctatgcttcgcgccgccggcattttttcagtgctttatgcacgatagaaaaagtgagtgatagctcttcacacaatgacataaatttaccggcaagtaattataataaactcagcgggcaatattaataatgccgttgggggtcttaaaaggatgagtaataagtcgaaaaagatgttgccggagcttttaaaacgctacagagagaattgcggcctttctcagggacaggtagctacggcactgagcgtagaccgttccacatatacctattatgaaatcggaaagacgacgcccagcatcaataccatgatgaagcttattaaaattttatgcattccttaccgggaatttttagagtgtgtaaacgacggggagcttccgaaggaatttgtagcgttgagcgactttgtaaccggaaaaccgaaggggcgttcaggtaaaaagatgaccgtgtctgaaaaggaaaaaatctatgagcttgccgacgatgagcaacagctgattatcgattaccgtatgatgtccagaagcgaacagaaggagcttttggtaaggctggcaaacaggctgcgggaccagcagtcctgataaattggacaaacctggaaaaactggggaaagcactttactttatgcgccgggtgtgttataatcctctggtgcaatgcccctttcacggatattggagtaagcctttttaaggattttcaccttcctttatctgagattgcggaatttccggcagggcaaataataaaaaggtggaatttaggttatgttaaaagaagaaaagaatgcgattatgcaggagtatgctcttcatgagggcgacactggttctcccgaggtgcagattgctctcttaaccaagagaatcaacgacctgaccgagcatcttaaggttcacaagaaggaccatcattcccgcaggggcctgctgaaaatggttggacagagaagaagcctgctcaactacctgattaagagcgatattgaaagataccgttctattattgcaaggctcggcatccgtaaataattgcaggattcggggcaggcggcttttgccgtctgccctgttagtcattttttgtaattttacaggcggctgcaatcggtttagcagtgaaacgggtatttacctgttttatgacgaaaacggcataaatatcggttttattgctaagcggtgcgtctcctgtgaaaataaatattattctttcaggaggtaattccatgtttgaaaactacaaggtttttgaaaccgattttgccggccgccctctcgtggtggaaacaggcaaaatcgcacagctcgcaaacggcgcgtgctttgtccgctacggggaaaccgtagtaaacgttgcggtcgccgcgtcagaaaaaccgcgcgacggcatcgactttttcccgctttctgtcgattttgaggaaaagctctacgcggttggcaaaatccccggctccttccttaagagggaaggccgcccgtcagagaaggcggtcctggtatctcgcgtgattgacaggccgattcgcccgctgttcccgaaggatatgcgcaacgacgtttccgtcgtctgcaccgtcatgtccgtcgacccggactgctcgcccgaaattgccgcgatggttggtacaagcatagcgctcaccatctccgatatcccgtggaacggcccgatttccggcgtttccgtgggctatgtggacggcgagttcgttatcaacccgaatgaaaagcagcgcgaggcttccaaaatggccgtgacggttgcttccaccgacagccgcatcgccatgattgaggcgggcgccgatatcgtaagcgacgaggttatgtacaacggcattatggccggccatgaggcaaaccagaaaatcatcgagttcattaagggcatccaggcggaaatcggcaaggaaaagttctcttacccgagcaacgagccggatgaggagatgcttgaggcggttaaggcgtttgctattgaggacgtaaagcttgcgctcgacaccgacgataaaaaggtgcgcgacgagcgtttaaggcccgtatatgaaaaggttcacgaaaagtttgatgagatatatcccgaccaggaagctaaaatcgacgagtgcctgtacaagacgcagaaattcgtcgttcgccgctggctgctcgacgagcagaagcgcgtagacggcagaggcatgaacgagcttcgcccgctcgcctccgaggttggccttcttccgagggttcacggctccggcctctttacgagaggccagacgcaggtccttaccgcggcgacactcggcccggtcagcgaccagcagatgctcgacggtattgacagcgaggaattcaagcgttatatgcatcactataatttcccgtcctattcggtcggtgaaacgcgtccgagcagagggccgggccgccgcgaaatcggccatggcgcgcttgcggaaagagcgcttgtcccggttatcccgccggttgaggaattcccgtatgcactaaggctcgtttccgaagtcgtttcttccaacggctcgacttcccagggctccatctgtggctccacactcgcgctgatggacgccggcgtcccgattaaagcgcctgtcgccggtatttcctgcgggttaatcacagaaggcgaccgctggatgaccatggtcgacatccaggggcttgaggatttcttcggcgatatggactttaaggtagccggtacgcacgagggtattaccgcaatccagatggatttgaaaatcagcgggctgacccctgaaatggtcaaggaagcgcttgaaaagacgcacagggcgagaatttatattctcgacgaaattatgctcaaggcgattcccgagccgcgcaaggagctttcttcctatgcgcccaaaatgatgacgacgacgattcccgttgacaaaatcagcgaggtgattggcaagagcggcaaggtcattaaggaaattcaggcgacctgcgaggttaagattgatattgaagaggacggccatgtattcatcagcggcctggacgttgaaaactgtaagagggcgctttcgattgtcgataccatcgcaaaagacccgcagcccggcgaaattttcaagggtaaggttacaaggctgatggactttggcgcgtttgttgaaatcgcgcccggcaaggaaggcctcgtccatatttcacagctcgacgtcaaacgtaccgaaaaggtcacagacgtcgtcaatgtggacgacattatcctcgtaaaggttctcgaaatcgacgaaaagggcaggctcaacctttccagaagggaagcgctcattgaagtagagggcttaaagcccgaaaatgagcttccgcccaggcgcccgcatgctccttcgggagacagggacagaagaggcggaaggggcggctataacggcggccatcggaattattgattccgtccaagcccgtttcaatatttaaaataggtaagcaaggtcagcagcccgttaaggctgctggccttgttctgttttaccggggcatttatgctgtaaaccattaaaaagagcgggccatatggcccgctgcttttataaaagatgtgttctttaataatcggctcggataaaatctgctatattcttctgtaagcaatccagcttcatgttccatgtttggcgtccagtcccggttttactggtttttccagcgcttgagcgtcggcaggaactgctgcatcatggtacgcgccgtttccggcgtcatgccggggttgttctcaaccatcggcgcaatgcagccttcaatcatttcctccatcgtgcagtcggcaagcacgcccttatcatagcaatatttgcagtaatccgtgcttttggaaccatccgtgtttgtaccatacagctcatcagtctgtcccattggcataccgcagcattggcaaaatctttcttccattgtaattctcctttttatttttagtctccgattgattcggtagccttattataccggagataagatgacagctgtatgtcatatatacagtgattgtaattttattttttaaaatctattttatcataattttcttgtattaatttttctattaaagtagacactgtcaattttttgcgcattgcgagaagctttgctttttctaaaatttcggagtttgctcttaaataaaaaacaccttgctttttgtcatcattaacatttgtaatttcattttggagtgattgttcggaatacctttgaactgcctgctctggagtaagacccgtggataaatcagataatcttttatacttctttgtcatgatagtgcatctcctttttgattactatctatatagtaactataaataggcgaattgtcaatatgtaactttaaatatagtattaggataaaggggataaaagaatggataatatggattcggtaatcaagataaaggaatatggaagaattggtttaaaactaaaagagcttatgctcgagagagatatcagccgaaacgctctagcacatttagtagatacacgctttgaagttattgacaggtggtatgaaaacgatgtgcaaaggctagatctcgacttgttggcgagaatatgttttgttttaaagtgtaacgttgatgatattttagattatcagcaaaaatagtaattaaagaacccaaacaacgtaaaaacgctgtttgggttctttttctgtaaagactaattcagcgaaatattccgcgcgaaggcgcggcgcacagcggtcccatactatctcgcctacaaaaacgaggaacggatagtttcctcttagggggattttcaaggggcttcgctccttgaatcggttgtggagggataggcggagggcggcgcgatgctttgccgcccgtaagccgtaagggaacccatcgaatgtcaagcccaacaaaggtaacaaaaagtacagggacaagggtaacagattcaaagagtatcaaggcgggagattttatgggaaattaggagatgttcaacaaggtcatatttggcaacttcaaagttgccataacaaaattggatacaatcatcaggaagctcccggatagcaagagtatgttccgcaagattctcgctgatgtaataggaaatacctttgtaaacaacataaccctttaagttgaccctgcacgtaatactgctagaaggatatgcgggcacttccagacggaaagggagctttcggctactggttgcatagaattcatctggtgtagccatatcaagtgctgcgtggggacgcaccgaattgtattcctggcggtaagcatcaaagagacgctgggcgtgtgccaggtcgctgattgaactgcgcagaagtaaatcttctttcagggtacggtgaaaacgttcttccttcccctgcgtctgggggtgcatagccctcccgtggattggaagaatattcaatttcatcatccatagctcgaatttagtgattcccctatgtccgtttccccaaggaggtccgttatctgaaagaataacatccggcaggccgtaaatttggaaaagttcctgaagggcatgatgaaccccaggccattgttgattaggctgcgcagaaatacatagggaataacggctatggtcatccagaagcgttaaaggatagcaacgtttcccgttttccatgacaaagtcacctttaaagtccatttgccataactcattgggatgttttcgttcaaaacgtttgtagggagtatgcatagcgctggcccgagaagaaactagaccattgcgtttgagaatattgcatacagtacttgcgcaggggagcgaatggtatccctgattttgcagaagacgcaaaagctttcgcgctccccatgttggatgactgagacgggtttgaataattaatgcttctaattccagcggggttttattgggggaagacaggggcctgcggctatggtcttccaactgttcccctgtttggtacctatttaaccatttatacccggtttttcggctaattccatattctttacacaaggcgctcatactaattttttcggttgaacaggcttgtacaaattttctacgtaaatctttcaattttcgttcctcccaaggcatttttttcgctccctttcccaagtttttatgccttgagtttacctttttttgttacctatgtctatgggttttctgttacctatcttattgggatatacatcgaaagggttcccttggaaaagcgctcgaagaggggttatgggcatcaggatgccgggagcaatgcgccaaatcatgggcttttctggctctggcttcgttatcgtcctccgaaggcgcaagccttcgttcgtcctctgcctcgccataaccgataaaagcctcatgatttggttcgaagaagtttgaaaagagaaagctccgccgattgcaagcaaagcgaacaagccatgctggcgcatggcgcgtgagtattgcgcagatagcggtggagatggccttttcaaaccgcattggctccggtaccctgatgtcctgaaaagagggaaaccgccgaaacggtttttcctcttttgtctgaacaaaaatgttttatgaagaaacccaagaaatacgacgtttcaagaaagaaaatgaaacggaacgttttaaataaaaagagagggagcccatgtgaatgggttccctcccaaaagcagattgctctaaaagtattaagcctggtattttagtccgcccggctcccagttttgaattgcctcataatattccttggcatattctttggcaagcgggagattgtgctccaggtaattgccgcattctgcggcggacgtcccgggaatttccccctcatactccgcgatgcccctgatgatttcctgaatcagggcaatcgcctgttcatgcgctgtgccgcgcagcagaaaataaaagcctgtccggcagcccatcgggccaaaatatattacgttgtccttcaggccggaattacgcgccatggtcgcaaaaagatgctcgatggtatgcatggccgccgtctccagaaacggcggggtattgggctttacaaagcgcaggtcgtaggtgaaaatatccccgtctgcgcgcgataggtaaattcccggcgtcagcttgttgtggtccacctgaaagctcgcgattttatccatgaaagtctctcctttttaaataataaacggtttcccgcccgaaagcgccgcggcgtcgccgcctgtaagaaacgcgtccgccattctcctggacagggcgtccgcctgttcaaacaggtcaaagaagctgtccgtacggggtgtgccgccgccgtcccactcgttgttcgcaatattggcgtaatcgtatgtatcgtcctccgtgatgcttcggtacatcacagaggagcagggcgcgctgcgctttttcttttcccggcgcaggatgaaatcctttttgagccctgtccggtcagtatgcttcctcagccatttttgatagtatttcgcgccctgcgcaatatcgtccagggttacttccctttgtagggccgcgcgtgccagcatggggaaaaggacggcgatatgctgggtgacggtttcgtccttcggcgcgcaggaaatcagactgacggagcttggcaggtcgcttttttcataacgcagcagaatcacgtcgaggttcacctcgataaggttgtgcgtgatgttttccgtaaggccagcctctgccgaagcaattttccccgcgccgtacaggacaaacgggtgcgctgtgctgtcaaatgcgtaatgtgtaaaaaaaccaagcgcatagcttttgtcgatgtcgttttttgtatcccgcgcgaaggacgcgatataagaaagcgtttggtacgggtcactgcggtgcagggaaccggctagctcctgcatttccttttccggatgcgcatacagaaaatccggcccctgcgcgccccaatagagcgcgttttgatttatctggaaatcaggatacgcctgctgcaaataggcagacatccggcccgcgagcagataatgcgatattacggagggcatggcggtaactcctttcgggtaatcggttatttgtttaaatcccaatcggcatattttccgtagtggctgattgaggagtcgaacgccgctttatccgtgcgttcaccatcgatgtagcactgcgggtctttgtcgtccgaagattttgtaactgccttataatcgggggattcctgtgtatatttgccgtcctcatacttattgaagcggaattcaaccgtttgcttgctgcctgacgtccggtattcttcgcataagacgatagaattcgtcgagctgtccacataaaggtcgagcctgcaaactttatcgctgtctgtcgatttctgaaaagcggtggaacgctttacgtcgtcgcccgtttgctttacaacatcaatccgacagctgcggctgccggtgtaatagagcagcagctccttgacgctgtcgccgtcaacatcggcaagcttgcttgcataaagcgcgagcgtcgcgttgttgtcgccggtgataactttttccttgacggaatcgagatatttgttgagtacctcagaattgtcacgcactgtgacttcggcagaggcaatgggggatataaaacaggaaagctcggcaatcacggtgcactttccctcgtttttcgccgtaataacgccggtttggctgacctgccccgtttccggggcggagcttgaccatttgagtcttttcaggtatgcttcctccaaatctacgactggaagcgccttttcatattttccgctgataagggtcagggagcgcttcacatagccgctgaattcagggtaagcgttttggagggaggagagtgcctccaggtattccggttcttctgtttttttaccgtctatggtaaactcgcccttttcagggacattgctgttctttttataggtgtatacgtccttcaggacctttacggaggaaagcttgtctccttccaggcggtaaattgtgacgcggcgtgtattttgcgtttcgccgttctggatttccgttgccttgatgtagagatttttgtccttgtcggtacagacggcctcctcatacgatgtaccgccgtgcgtaagcagtgtctcgggcttgtcgaacgtcttgacggaaaccggcttattatcctggagccttacaacctctgctccggttgccgcgccggcctggtattctatcaaaagctcataatggccgtccccgtcgatgtcgaggattttacactgtgaaagcttgattgccgcctcttttttatttacctttattttctggctcagaggcagccctgacaaatattcatttaacaggttgatttcctcaatgcggctgtccgtgactttcaaggaaagctccgcggagacggccttttccgccatagaacgcaccgttatggtacagctgcccgcggaaagcgcggtaaccttgccgctgctgtcaacggatgcgatattctcatccgagctttcccatacgacctctttgttttccgcgtccagcggcgtaaacaaggcctttaaagcaagcgtttccccatatttcaattccatcttcccgttttcaatcgcaagcgccgttaaagaggattttgtaggcgcctgggttggcggttgcgttgcgggttccgtggcggactgcgtcgcgtaggtacgcgcgaccaggtttgtcacgagtgacgggttgaacaacaggacgccggccgcagccgcgcagacggctgcgacagataccattgtaattaaaatagccttgtgcttcataggagggatattcctttcaacgtgaattacggcggaagaacgcttccagttccttccgggttcactcatattgttgacacttctgttatcaattataaattgacggtgcaataaggtcaacaaaaagcgggaaatattatggcgaaacgccccgaatacagaaatttcctgaagaaaaaaggcctccgtttaaacggaggcccaaaacgcgcacggtaaaattaatttagttgaggtcttcggcaaactcgatatccggcgacattgccgaaacatccgtggctgcgccttccagggctgaagctgcgccggtcggcgttatagaagcctgcgcaccggctgccgtttcaggggaaagcgcggaggccgccttggaggatgccgcggacgatggggatgcggaggaagcggcggacgttgcggtttgccctgatgaatgcatccgtccctcatggtcggtcgtataggagccctttaacaggatttgggaaattgggacgatttcatagccctcgcccttaatcatttcgataatcatcgggagcgcctccggcgtgtttttcgcgccgttatgcagcaggacaatactgccgggctgcagctttttcttgatgcggtcaaccatctgctgcggcgtggggtctttccagtcgaggctgtcaatgtcccactggacgcagtacatattgatgctgttgaccgtttctacgagcgtgttgttgtagtccccatagggcgggcggaataaggtcgggcgcttgccgatgagcttttcgaccttatcgttgcagtcgttcagctcgtcgagcatctgcttgctgctcatctgcggcatatgcgggtgggtgctcgaatggttgcccacgtcatggccggccttcgcgatgtccttgaccgaatccggatatttttctacccattggccgacgaggaaaaatgtagactttaccttatatttatcgagaatatccagcagcgtctgcgtttgctcgttgccccacgcggcgtcgaaggatatgctcacaaccttctcttctttttcgacacaataaattggtattttacgttccgttgtcgatgcgctcactaccccgctgtagctgctgaagcatatggaaaccgcaaggatgcacgcaatgacacagcagccgagaatcagaagcctttgcttggtgaaaacaaaaaatttcataacgaatcccccttatacacatgtgtatgcgggggacggcgttagaattctattaatttccgcttgaggcgacgatatcgtacatactgaacatcggcacgacgatagagatgactaccgttccgacgacaacgccgatgagaatcgtcatggcgggcgtcatggcgtctgtcaggcgcttggtggactcatccgcctgctgctcgtacatatcggccatttttttgagagaatcggcaagcatgccgctttcctcgccgacgcgtatcatcgagacgagcatggaatcgaaaacaggataacgcgacatggaaacgtttatcggcgtgccgattttcacgtcctcgataatctggttcatgcagtccttcatgtaaaggttcgggatgacgtcccgtgaaagctccagcgagcgcaggatgctgacgcccgcgtctgacagcgtggccatcatgcggcagaagcgcgaaatgtgcgataggcgcataaccgttcccaccagcgggattttaagctgtacctggctccagcgcatggcaaagctttcgttgtattttttgagcgccttgaacccgaacacgagcgcaagcaccgcagcgataatgatgtaccagtaatggatgatgacgtcagaaacgcccataatgaactgcgtaatgcccggcagctcggaatcgaagcttgcaaacaggtttgcaaacgtcgggataacgagtatcgacaggacaagaatcaatacaacggtcaggccgagcaggaagatggggtagcccatcgcgctcttgatttttccggacagggaaatttccttttccagaatcagggcgcactgctcaaacgacatatcgagccgcccgttcgcctcgcccgcctgcacgatattgatgacaatcgcggggaacgcgcggaactttgccatagagccggaaagcggtacgccgttataaagctccttattgatttccgccaggatgctccgtacgtttttgtccttttctgtatcaatcaagacctccatcgcaagggaaagggagatgcccgccttcatcataagccccatctggtgcatcatggcgagcagcttttttttcttgatttttaccttgtggatgtcgcgggtgtttaaatccttttcccaaatgcttttattggcatttagctccgcggcctccctgaactcgtcaatcgaaagggccgtcaggccgcgcgcctgcaggtttttcctgatttcatcccgcgagccgccgaccatctcgcccttgtatttcctgtttttgctgttgacagcggtgtatacatacttcaagcgtgtcccacctttttcttttccttacttatcttgcggaattcatcccgccgtacatgccgcccatgcttgcctgcggcatatcctgctgcgctccgacgtcgaagctgtattgctgcgccgtctgcggcgtgataaagccggtttcgagcagcagctggatgctcgccttcatagtcgtcatgcctgtatttttgttgagctgtatcatctgctccatctgcgcgattttgttctcgcggatgaggtttgcgattgcggagtttacaaacataatttcaaacgcgccgattcgcccgggtctgtccgcacgcggcagcagcctctgggaaatgaccgccttgagcgttgtggaaagctgtccgagcgcctgctgctggcgttccacgggatacatatcgattaaccggtcgattgttttggcggcgccctccgtatggagcgtcgagaaaacgagatgccccgtttcagcggcggaaagcgcaatcgacatcgattccaaatcgcgtatctcgcccattaaaatgacgtcggggtcttccctcaatacggcgcgcagcgcggcgccgtaggattcgctgtccgtgccgatttcccgctggttgatgacgcagcggataggcgtgtggacgtattcaattgggtcctctatcgtgatgatgtgcaggtccttcgtcttgttgatttcgttgattagggcggcgagcgtcgttgatttgccgcttcctgtcgggcctgttacgagcacaaggccttcccgcaggctcaataccttcgagacagagggggggaggctcaaagcgctcagctgaggcgtctgcgcgttgatgatacgcatgacaagcgtgacgcccgcgcgctggcgaaacgcgttgatgcggaaccgcccgtagttatttatattggcggacgcgtcggcgtcgcccgtttgacaaaatttttggaacgcctccggtgacagcacggcttcaatacagtcagtaaccgcctgctgtgtaaggacaggctcgctttcatcaaagcagattttgccgtttatacggacagcggggcggttgcccgcagataaatgaatatcggacgcgccgtttaacacggcgttttttacgaatgaatcaaaatccatatgggtaatccctccagcggatttaaacaatatcgtcgtcgattgtggtatcgatcatggtggcaagggaaatcgtcccgtttaaaacgagccgccttaaattttcccgcatggggagcatcccctcagaaagcgcgatttcattgatatgcgccgtgctttcccccgagtggattgccgcttttattttaggggagacaggcatgatttcatgcaccgcgattcttcccttcgtacccgttttgttgcacttgtcgcagcccttttcgcggtagagcttctggcgggttccggcggggaagcctaaaaacctcagctcctcgtcgcttgcgaaatacggctcccggcagttggggcacagcctgcgcacgagcctctgcgccacaacgccgagcaccgccgaggtgaccatgaaaggctctacgcccatatcgaccaggcggatgatagagcttgcggcgttatatgtgtggagcgtggaaaggacaagatggcccgtaatggcggcggaagacgcgatttccgccgtttcgcggtcgcgaatctcgccaatcatgacaatatcggggtcctgcctcaaaatcgagcgcaggacgcttgcgaacgtaaggcccgccttgtcgttgatatcgacctgcgtgataccggggataatcatttccacagggttttcgacggtgacgatgttgatgtcgtcgcgctgtatttccttgagcgccgtgtaaagcgtcgtcgttttgccggagccggtagcgccggcgagcaggataattccccggtggcttttgagcagcttttcaaatacggcaaggttttcgggcaggaacccgatgtcgtatttatcgagcgtaatgccgagcgccgtcgtaattctgataacgattttctcgccgaacacgctcggcagggaggagattcgcatatccacctcggtaaggccggcgcggtaattgatgcgcccgtcctgcggtacgcgcttttctgcaatattcatgccgccgataaacttgatacggcttgtgaccgagggaatcaaatccggcccggtttccaggtattttaccagcttgccgtctacgcgaaagcggatgagcattttcttttccaagggctcaatgtggatgtcgcttgccttctggtggacggcctcttcaatcatattattgacaaaccggataatcggctggtcttccgtcgcggcctgcgcggcctccagctcgtcgctctgccccttcgtcatctgggagcttacaaattcctgcgcgtcgtcaaacgccttctttgtggcgtaaacctcgcgctgcttctccttgatagcggagctttccgccaatacggcgttgatgcgcagctttgtgtagatgcccagcgtattgattgccttatagtcgagcgggtcggacagcgcggccgtcagcaccttattgtccagccggataggaatgacgttgttggataccgcgatgttttccggtacgatttccgaaatctttgggtcgatttccaccgcgcccaaatcaatatactgcatggaaaactgctttgcaagcgcctggcacagcgtctgctctgtaatcagcttttcttcgagcaggatttcgccgagatgcttatcggtttccttctgccgggcaagcgccttttgcagcatttcaggcgttatggcgttcatattgattaaaatctgtccgattttcaggctggaacctctcattcaaatactcctttgtttgcttagggtctttcttttatatgcccaacaggctgaggtacatgcgcaaggctgagaaaacagggccgcgcagcagaagaagcagggcagtgccgatgcagatgtatggccccatcggcagatacgccccattttttgtttttttggtgagaaaaagaacgattatatggaaaaacgctgtaaaaacagcaaaaataaacgctgtaaaaaccatggggaagccacaaagtgcgccgagtgccgaaaataatttcacatcgccaaagccgaagccgtcttttttcagcacggcgcggcaaataaggtcaatcaaaaagaaaagcaggaacccgcacacagcgccgagcagcgggctgtaccaggtacggataaaccactgccctgtaaataagtcgcagtacgcgcccgcaaggcagagcaaagcgagaagcgcggtgaactggtcggggataatcgtgtatttcccgtcgcaccacgcaatcgccgccaatacaaaaaaaatcaggacgagcagtatggcgtagggcgccgacccatacacgaaggcagcccccgcggcgcttatggcaagggccgcggcaagcggtaccgtgcgtttaatagtgaggcgttccccggccagaagttcctgtgccggttcttcgccgtagtcgcagagccattttgccgggacggcgtttatgataaggcggcccaaaaaggcaagccccgcgcccaggcaagccgccgcgaggcaggctacagcgcgcattactgcgccgccgcgtcctgcgcgggcgcgccttccctgaagtaatagagcgaaatcgacatgcttacgttcaagtccccggcggaaaccgcctgcttgccgcttcccgcgccctgcgtgacggtgctcatgctgataccgctgatataataggagcctgccgactggtcttcaaaataattgatgacgcgcagcagcttttcccgggaggcaacgaagctaagggagatattcgtagaaaacaaggaggcgcccgtagaggactgcgccgcttcgactgcctgcgcttcgtccgacacgctgatggaggagggggtgacgtcaaggctttggaacatctggttgaggtcgttcgcggtatccttcgcgtcgacgaacatgagcgtttcaagctggtcccagcggattttcaggtcgtttacctgcccgcggtagttttcgatgctggttagcttcatatcgtacaggcgcagggtcgtctgcgcctctatgtgctttgcgtccatcgctggtttttggttgaggtaaggcatcagcaccagcgggataaacaggacgagcagcagcacgatggcggcgagggcgaaaacatattttggtatttttttacccatcatttccattactgctcacctccctgtgttgcttcctccgggcttacagacagcgtaacggtacagctgcccttgccctgcgcgccgttttccgtataggagaacgggatggcaatatcaaaatagccgctgctttcgacctgcgttttcagcttgacgtacgcgtcgaaatcgtcgacataaaagctcagggaaatgcggttttgcgccgcgtcgtaatgataggaggcaacctggtatacgttgtccgttacctgggtgaaaatctcgttgattacgtcccttacggggcggggcgcgcttggcaagagcgccttgtcgcgctcgacgttgtcaatcttcgtggtcagctcttcttcctgcgcgatgagctgcttggtttcgttgtatttggggtcgttcagctgctgggtatcgattgcctgctgtatgtacaaatagccgtacaggcttccaattacgagcatcataacgcccgcgcaaacgccgaacgctatcgtcgccgcccttccgatatcgcttttgcgggacgagggggcgttgatgggggtcaggaaattacacttgttgtcggcggagagcgcgacaaggttcgagagcataaaatagctcgacgggcggaagcccctgcgctgcgcctcctctgtgagcagggggacgtcttcctgcgaaaaggcggaggacgcgctttcaagctccatcataaatccaagctggcgcaggtatttcaggaaattgggcagctctgaaaagcggtcgcacacatagattttatcgatttctagccgctggctcaaaagcaccatgcgcaggctgcgcatgatgtcgcctgaattgctgtccagaatcgactggacgatacgcaccgtctgcgggtcgtcctcatcgtcgagcaggccgagcacgccgtcctcgaggatggattcaagcgcctcttcaaactcgagcctgcgttttttcgccacggcctgcgcaagctccccaatgggggaatcgaacgactgggcgtaaacgggcgcgccgtttttcaccagcacaatgcggatagccgagtaatccacgctcaaaagcgcggccacctggtttacgctgttcacgccctccctcgcggcgcgcagcatggcggcgctcggcgggataattttatagatttttaaacggaattcctcgaacgccgccttcagctcgtttatcagcgccgtcggcatggcgaagagggacgcgttcagctgggacgcaggctcgagcgcttttccgtattccataccgtactcgtagcggacgatggaatagttcgctacctcgtcggaaatgaccgattccgtttcaaggactgtaagctggtttaagtatttgtcctttgccgggggatgctggaactccttgattgcgacgctgtgcctgtccgggcagaggaggatttcgttacagtctatctgcgcgcggtcgaggcagttttttgtaaactccgccagacggcggcagttagccatcgcgttgtccttgagctccttgggcagctcgaacacctcggtcgcgccgaacacggcctgcggcgccgcgggcggggagaacaggccctttttttcccttgcctggcggtttttgagcgtttccgcgggcgtgagggcgataaattcgctgctgatttgcaaaatcgtgaatttcaagcgttacaccacctataatctgctgttttaccattatgttttccatcctgtgccgttctgccgcgccacaaagccctgggtaagggcgcgcggcataccatccgctgccaagcggcttattaacctttattatactacgcccggggggctctccgcaatgataagatataccgatattttcccatagggtgaagtttttttcatgaataagatgcgggggaaagcggagtcaggagaagggaaagggcgcttagaaaaaacgggcgggaatggcggggcaaaaagaaagcccgccgaagcgggctttcaataaatttaagaattaaatagtaggtgcagttgttgttaatgtaccatcggttccaatataaagggcagcagtaatttctgttgcacccgcggcatcggtactaccttcagcagcggcaaaaacatctccatctttccaatacatatgatagtcagtcccgccaatatcttttgtataagtagccttaaagccattcgtgttgaaaacttgatctacagtgacttttccagtagtgacatcttccttcacacttgtacttacatcatattcggtgtgaacaccagttctagcttcgttaagagctgctttaattagcatattagcagtggccgtttcgctctgatatgtacttaggttcgccgaattgattgtcgaaataatgaccggaatggcaattgccgcgagtatcgcgaggattgcgataacgattacaagttcgaccaaagtaaagccctttttgttctttttggcctgaagcttttgaatgattgtggtgttttccatgttgttccctctttcttttctgtttggattattttggaagtagtacgccgggattcgacgtatcgcataaatagtctaacgcatgagcgaagaacttgtcaacaacttataaaaaatttacgtgtaaaaaaaaccaatcatattttgtaagaattaaccaattggaagaatttgttctgcgataattttaccaaaccggaaggatgaacaaaagcttcgacctcaatttgtacgataagacggggcttttccccttggtaaatttcacaatttatagtataattaaaaaagtataggaatgcggcctccgcgcggtaaaggcggtatgccgcatatgtttagtaatcgtttacataaacattttgcagaacgagcaattttgggatttttggtaaaacgggaaaagggtgttgcgatttgaagcagtccaaaaaaggctttgcgcttgtaagcgccattgtgatttcagtcgtgctgttcatcctgaccgcggggcttattaccgccgcgatgatgagcatgaacatgacggcaaaaaatatcgaccagcggcaggcgtatttaaacgccaagagcgcgctcggctttgccgagtcgtattatatcgaccagctgctgctgccggattctgacgaataccttgcctttgcctctgaaaacggcgcggtaagcgaaggagcggacaggtctaaggccgtagcaagcgccggacgggcggaaacgccgccggacgccgaaacatacgtgaaagcgcactacgatatggcggcgcagacgtttaagctcaccgcgacggcgcgctttcgcagcgcatcgctcgacggcgcgcagaccctgcaactaagctgcacctatgacgtagggtacgacgccgacggcaggattacgaccgtggtcaagaaaatcgagacaaaagacaagtcgcgctacgtctatatccacgtaaaaccgtatgacgacgtattccagccctatctctacacttgggggtacagcacaggtcaggaggaacaaaagcccgacggtaacccgccgaatacgcttttctccggcgagtggctgaaaaaagacacaaccgacgggcaggggaactttttgtatagagggccgcagggcgccatgctgcgcgaatcgggcggcgcgggcggcggctggaacgggtggtactacacaaaaattgagctgcacgacgacaatgtgaaatacatcaacgcaatcattgcgaaaaagggcgcgctgcgcgataacggcgacaatacgacgcagtcgcatgaaatattccagctgcccgtaccggagcacgcgggggaaacgcaggacgtttacatcaccctcaacagcgagagcctgcatgatttcaggagctacgagatggacagggacgcaggcggcaatccgcgggtgtatcccgattcgttcacagaatacctgacaagctacgtcaaagcggattacacagccgtgcatgtgcgcgtatccggcgcgaaggatgaggggcgtgttttaagcgcgcctgtgcttcaaacggcggaattcgccgacaaaaacctgactaccgtgctgacggagaacgagccgcccgtaaattacagcggcggcgccatgctctatgaagggtacggctggtaccgcatcaacgtgccgaccaaacgcgcctttgcctttacgattaaggatgggggcagtacggttttccagtctgacggggaggaatcgggcggtacggacaatcaaatctggattgcgcttccgtcggcggatatgggcgcggaaagcccgcgcgtttttaaaacagaaaatgaggccaaggccgcgtttgccgatatggcgcaacgcaacgggaaagaggacaaatgcgactattcgaccgtaaatgtaaaggggctggcgctcagccgtgagaacatcgacgatgtacccgcggtcctgatgaattattttgtaaaagaatccggcggggatatcccgctgcctgagccttccggcaagtatctgctgacgctcaaatacaacgacgaaaaagacacggtcaataaaaagctttacgacgcaaaccaggcggtcaccctgccgtcgctttcacgcgagggctacgccttcaagggctgggcgacgagcagcacgaagacgcagcccgattaccagccgggcgatacgtataccgtaaaaggggacgcctacctgtacggcgtgtgggaaatgattgagtatttcgtccagtacgacgcaaacggcgggcaaaacccgcctcccacgcagagctttacggtggaaacgcctgcgcagtttgcctcccagggcaatatgaaaaacgaaagctacgcgtttatcggctgggctacggcaagggacggcgccgcgctgtataaagcgggagatacaatcgacccgtccgttatgaacggtaaaacgagtataacgctttacgccgtctggaaggacagctttaccatcacatacgataaaaacggcggagaagggaccgcccccgcaaagcagagtataaggcccggcggttctgtcacgttaagcaatggctccggccttaccagaaagaaccacaggctgctcggctggtccgaggataaaaacgcccagtccgcgcagtacaagctcggccaggtggttgtccctgaggacgaccttacgctttacgctgtttgggagaaaacctccgtaacggtatatttcagcaatctaaggggcctgacggatgtgaaggcctatgtctggaacgacagcacaaaggctaatatgggaaactggccgggcgaaaaaatgaccgatacgggcaaaaccgtggagggctaccaaatctattcctatgaggtgccgctcaacgcgggttatgaccggattatttttaacggctccgaaaacgaaagctttaaacagaccatagatttgacgctcagtgaaagcaagccgtttttctattatcggtatgataatgcgggcgacggcagaaacgccgacaacgggaaagatatactcataagcacgaccggcgtaaaaacaatctattttacgaaccgttttacatggcaccaagttaacttttacgtatgggacaaagctcaaggtacggaaaacagcgcgttccccggaaaaataatggattatgtagaggacaacagctacggacagagggtttaccgctaccgttatcctattggaaaatacgccgccgctattttcaacagcggcagccccgaagcaaagacagaaaatatcaatatttcgcaggacgtgaacaatcagggatattacataaaagacaattcctatagcagcccgtacgccgtcgagaagtacgtctacgctggtgcggacgccggcgtttcttacctgtcgcttcgcgcgcccggcttggcagacgccaacgcgctgccggcgcgcccggcgcttcaaaatgataaagcggcggtgttacaggcttttcccggcgcgttatccgcaaaaagccccttccaagggcaaagcctgctgtccgtgtttggcggctggctccggtcctggcttgccccggccgcgtttacggggatgcagccggtttccgctgcgctgcaaagctacgcattgaacgaaacaaatgaaggacagcaggacgacgcaaatcccgacagcgtataccttacgggcacgttcaacagctgggcatatgacaacgaggattacaggctgaaggcggcggacggcagctttgaaaaatttgagtataccatgacgctgcccggaggctcttcctataagttcaacctatacgacgacaatacggccataggcaaaaacggcgcggttttcagcggggatacggcggaaaacaccgcgctggaggccggcggaaaggaaatgagcctgcaaaccatgggtgtaatttccgaccggattgatgtgacgttcacctacgggcggaaaaccgcgggcggtaaggctgtttatacactaaaggtaacacagcggccgtctgccgcgaaagaaagctttaatatctatctcggcgtttcctcgtctattgtcagcagcaaggggaacggctggaaaacgccggatgtcgagtgcagggacgcgggcggcacggtgtccagctatattgcgtcggcggcactgaacagtgacgcgtcgcgcattgcatataacggcggggaacaggatttcttcctttcctacgcggagattccggctgtgcgcaaccacatcaggctgtcggtgaatacagccgcgcttgctgcggatttcctgcaaaacgcgaaggaagaccatttgtacctgctctaccagaaggacgggaaatatattctagcagacaacggcgcgtatacgccatcgatggacggaatcatcgactttgacggggcgtggacgcaggaaaatattgagattgcgtccgcacggggaaccaaggtacagtattacaatacctatatgagcaagtacaaaaacgcggaggatgtaattacagacgttacgccatacgacacctacggtattgacgagaagcgcgcgggcaacagtgctacctgctacttaaatgactggtatacctataaaatccccacgcagggagggagctataccctgcagtttacaggcctgaacggtaaggaaaatacatttgagagcggtacggatgatttgagcaccgacgccggcagggcaaagctcggctcatccaccgccgtggtcaacagcctgagcggggatacatggattacgctcaataccacagaaaatattggcggaaagctcactgacctttcggtttacacctacgaccccgaagacaactacgcgggcaaggaaacaaccgtatatctcgatgacaaggcgctttggggcggtgaaaaccacgaccagccggtctatgtttattattggggcgtaaagaccatgtcgtggcccggcaaggaaatgaaatacgacgagaatatcaaaatgtattacgcgacgattcccagcggctccccattcctcgtattcaataacggggccgcgatagatggccccgaatgcaaaaagaccggtatccagacgctgcaggcggacagcacgaaggtccgcttcaataatgcgtcgggtcagtgggaatcttatatccatccgaaaaacgcgctctttaaggcaatcagcgacggaaccgccgcgctcaaccgctcgacgatacaaaaaaatacagaaaataaggacgatgtggtaagctttaccgttttggaaaccctgattaccgacgcgcgcgccgtatacgacaacgattccttcaatgagtttgggacatatacgaagctgctcaatacatatgtagcggacatcgacaaattcaacgatatccttcgtgaagcgcgcatctatctggaaggataccctgagcaccggtactacgacaacagcgttacatacagcgaagcgtcgcttgctaacctgctggacgcgcataccgaggcgatgcaggtgttcggtataaccgaccgcgcagcggcggcacagaaaatccgctcgcagtcgagcaagctgagaagggcaatcgattcgctggagctgcagctctccggcggaaccgacgtacagcccgggcaggcagtcgtggtgctcgacaaccaggcgcagtggccggtgctggctgctttaggcggtcccggctccatagaatacgcggcctatacgcaggcggatgacggaaccattacagaaggcgccgttaagaaagacagccttacccagtacaacagccagggctattacctttatttcatcgatatcccgacggggagcgacgcttgggcgaagtttgcttcccataccggcgggctggaatccgcccgcaaaaacggaatcaaggcgggcgaggtctgggtttataacaataagacggggatgtggcgcgaaaataccgccggcgatttccaggtaatcggcgtcagcaccatttccggcaagcgcggggaagagcgcgtatatacgccaaagcaggcgggagaagatttcaagctgtccgtcacctacgataccaccgtaaggtacgatgggacgcagtatgtcatctatgcgggcgtatatgagattaagaagggtgaattccctgagggaatcaatctgttttccccggatgcaaaggcgttcttcacaaacccagtaaacttctggtttgataatactgcaagctcaagcgtggatcttggctggacggacgcggacggaaacctgcggaaggcaggcggcgcgggcgtgcccgtcggcggtacggtcaatttcctgattgggggaaaactcggcgcggacacacccggttcgtccggcacgacgccggagaaagcgccggtgcgggtgtatttttacaacaaagataaaaagtggccggaagaaaacggtattaccttaaatctatacaacagatcttttaaggtaactttaactaaaagccatgtagaaaactatttttacgccgatattccgggcaatatcaacctgcaggatgctgaatttggattcaatatcagcgatacatatgaaattgattatgatagcggaagaagatatgcctccagatatatcgatgtcacaacggggcagaccatcctgtttacactgggagaaacattgaatggcaacaagaactttttaggggattggtcgctgcttgccgaccccgaatccgtaaatcccggtttcgcgctggatgtgcctgaggaaacacctgcaagcggcataaccggcggcgacctggacgccgcgggccagcacaacctaattaccggaaacagcgatccgcttagcgggcaatacgcctactccgccggcaaaatcaatttccgctgggtagagggcgatgtgctcgacgtgacgggtgcggatttatggctgaacagcagtgaaatcacctttgcgtgtgcggagctttccgttgaaaagaggttcggcacatacctgggcagctttatcctcggaaaagagggcgccgggctcaaggagcagaccgttaccttctataacgacgtggccgtcactgtatataacagcgacggaagcgtaagcaaggacgattcctataccatcaagaacggcaggtacaaaatcagcgggaaggtaaacctgttcgactttaagaaggagctcgacaagagcgacggcacaggcaaggtcataagcgtcgattccagcaacttttcgggaggtgtttacggccatgattaaaagcaaaaagggcgtaacgcttgtcgagctgattgcggctgtcgcagtaatcgccatcgtagtcgttgggactgtatcgggcgtcgtgcttgcgcagcagaatatattaaacgacagcctgaaggagcaggcttccctaaaagcgcagcaggtggcggacaccttagtggaaaaaatgtccggcaagccctatacggataattatgcgtccgccgccgcaatcccttccagtgagctggagggggccgcctacagtatgcaggcggagagtaatttcccaaattcgcggggcgatggggaaatccagtttgcagtctatgaaatggaagcgaagaacaatgcctcaggcataagcagcggtatccagatagcggggacaaggattctggttgctgtctattataaggacaacagctatattacggtagaggcgttcgcgccggaacgcacggcgcccgattgagaaagcaggtgaatggcccggtggcaaggaagaaaatcaaaagcaagaggggcgtgaccctgacggagcttgtcgcaaccatcgcgctgctttccattttggcgggcgcgagcgtggcggtcatcggcgtcgtgatgcaatcgttccagaaaaacacgaatatcgccctgagcgggcaggagattacgcaggcgcagaacctgattcaccatacggcggaggttgcaagagaggctgtgtcagcggatatgggtaacgccgccgctttcaaaccagacgaaggggacaggcggctatccgtaacggacggcaggctcgtgatgtcggaatataacagttccggcgcgtgggaggattacctcccgttcgacggcctttccaaggcgcgctttgagctgcgggaggattcgggcggcggttttctccttgcctatcggtttcagacggacaaggcgctttcctatgacggcggcgtcacgctcaataacgtaacggcggccaccccctttaccgtcgagtttgagacaggcagtacagaggccccgctgccgggagagcctgtcgcctgtatttactttaaaatgccataatacataataaaaaacgggaacgaagactgccttcgttcccgtttttatcaggcggacggggccttgtaccccgctttttattgctcgatgcgccactttatgccctgcggcgtgtcctccagaataacatggcgcgcctttagctcgtcgcggattttgtctgccgtcgcccagtccttattttttctggcctgcgtacgctgctcgataagcgcttcgatttcctcgtcgagcgactgctctttttttacgctgattaaaccgagcacgccgttgagttcgtcgaataaatcaaggcagaacctgcataaatcctgtgacgggctgtttgctggggagagctgcgtgttgatgtccctcgcaagctcaaatacggcggcaatcgcgtcggcggtgtttaggtcgtcgtccatcgcttctataaatttatcgcggtggagcgcaagcttcacctttgcctcctcgtccgtttcgttcttttctatggcggcgttttgcagggcaaacaccgtattgtcgcggcagttgcgcagccggtcgagggatgctttgcactgctctataatttctgtgttgtagttgattgggctgcggtaatgggaggaaatgagcatataacggataggttcgtagccgtatttttccgcgacatcgcgcacggtgaagaagttgccctcagatttgctcatttttttgttatccacattgatatagccgttatgcatccagtagtgggcaaacggcacgccattgcagcattcgctctgcgcgatttcattttcatggtgggggaaaatcaaatcctgtccgccgcagtggatatctatggtatccccaagataccgccgtgccatggcagagcactcgatatgccagccgggacggcctttgccccagggggcttcccacattggctcgccgggctttgctgatttccacacggcaaaatccattgggttttccttaacttctcccacggtaatacgcgcgcccgcctccaaatcctcgagcggctgatgggaaagcttgccgtattcatggaacttattcgtgcggaagtaaacgtcgccgttttgtacggcgtaagcgtagcccttatcgataagcgtttttacaatacggatgatttcatccatgttctccgtcgctttgggatggatggtcgcctcgtggacttgaaggccctcggcgtcctttttatattcgtcgatgtagcgcagcgcgacggtcaggtaatcggcgccttcctcgtttgccttgtttatgattttatcgtcaatatcggtgaaattctggacaaacgtaacctgatagccgcggtattccagataccggcgcagaatgtcgaaaatgcagataggccgtgcgttgccgatatggatatagttatagaccgtcggcccgcaggcgtaaattttcacctcgtttggcttgatggttttgagctcttccttctgccttgtcagcgtattgtaaattttcatcggatgttcctccctttattctggtcaaacgtttggttccgttttgttttccttcccctgtaaattcacatggcgctcaagctttgtatacaggtattcgagcctgcacagctgctgggcgaccgggtcggctacatggatgtggtcgaggcagtcgttattctttaccccgttgatgcgcgcgatgcgcgccggaacgccgactgccgtggaattgggcggtacctcgtcgagcacgacggcgcccgccgcaatgcgcgcgttgtccccaaccttgaacgggccgagcacctttgcgccagccccgacgagcacattgtcgccgagcgtgggatggcgcttgccgtgctccttgccggttccgccgagcgtcacattttggtatatggtacagttgtcgccaatgatggttgtttcaccgatgacgacgcccatgccgtggtcaataaacaaccccctgcctattgttgcacctggatggatttctatcccggttttatgacggctgcgctgtgaaataaagcgcgcgatgaacttcatgttatggcggtaaaaccagttcgatttgcggtaagcgcgcagcgccttgaagcctgaatataggaaatagacctctgcccggctgcgcgccgcggggtcgcgcgctatgatagaatccaaatctgcctttaatgtatcaaacataaccggcccttcctttccgagtggttttcgtgaaagccgcgtaaagcacaataaaaagccccgcccctcataacagggacggggcgattgctccgtggttccacccaagttcagcggataagaaatccgcccttgtgcgccctgtaacgggggcggccgcacagcgatactctcgttttcccgctgtgtgctgacgggtgcatttcacaggctttctgtcaaaggccgattccagctgctacggcctctctctgttgaagaaatttcccgctacttctcccgataaacgcatttgttctatatcagaatacgcttccattatataacaggttcgcaaaattgcaaacggtttttcctgaaaaaatataatcagcgtgcgttttcaatgaattccttattgtccttgatgtaaattacgccggaaatcacagcaaaaacgacggatatccagattaaaacgttgtcggcaatcatcacgacgcattcccatgcgtaaagcgcgtcgggcgacatgcgtatgacgttcatgtgcatcagctccaggacatattgcagcaggaatacacagccgattgcggcgatctggctgactgttttcgactttccccaaaggttcgccgcgacgaccttacccttgtttgcggcaatcaggcgcatagaggtgaccataagctcgcggaacaatataatgataaccgggacggcgccgacgatgccgagctccacaaagcatatcagagcggaaagcacgaggattttgtcggcaagggggtctgcaaatttaccgaaatccgttacctggttgtttttgcgcgcaagcctcccgtcaaacatgtcggtaagcgacgcggcggcaaaaatcagccccgcaatcaagaagttgtggggcagcgcggtgataagcagcgccgcgacaaaaaacgggacgagtataatacgcagcagggtcagtttattgggtgtgttcataagatagcccaccgttctaaagagtttcaaacatggaaattactgtacgagcgtgccgattgggtcgcagtcgagataatcgtccaccattacctgcacgaactgcccggccttcggcttttttccgtctgcggtgaaaaagaccttgccgtccacgtcgggggagtcggcagccgaccttccaaaataacactccgcgtagcggtcgtagccttcggtcaagaccgttatggtttttccgattaggccctggcagtacctctccataattgtatgctgctgttccatgataatttcctgccggcgcagctttatttcttcgtcgatttgatttttaaacgacgcggcgggcgtgtcctcctcctgtgaataaggaaaacagccaagccgttcaaaacggacgtcatttacaaactgggaaagctcctcgaagtcctgctccgtttcaccggggaagccggtaatcagcgtcgtgcgcagcaccacaccgggaatcctgtctctgatttttgcaagcagcgcggccaggctttccttatcgccgcggcggttcatggccttgagcacgccgccgctgcaatgctggagcggcaggtctatgtattttaaaatcctgtcttcgcaagcgatggtatcgattagctcgtccgtcatgcggtcgggatagcagtaaagcaggcgaatccactcgattccgtcgattccacacagcctgcgcagcagctccggcagcatcagcctgccgtataaatcctcgccgtagcgcgtggtgtcctgcgcaattacaatcagttcctttacgccccttttcgcaagcagctgcgcttcttcggtcaaatcctccagggttcggctgcggaaaggcccgcgaatcagcgggatagcgcagtaggtgcagcggttgtcacagccgtcggctaccttcaggtaagcgtaatggagcggcgtgctctgaaccctgccgcctgtaagcggcattttgagcttgtcagggaaggcctcgaccttttcgccgcttagcgcttttgccacgatatctgcaataccggcgtttgcgccgatgccaatgacggcgtccacctcgtaaagctccttcatcacgtcgccctggtagcgctcgcttaagcagccggtgacgataatcgccttgatacgcccttcttttttgagctttgcaagctctaatatctcctctatgctctcttgctttgcggactcgataaacccgcatgtattaataatggcggcgtcagccatagcggggtcgtccacaatatgaaagcccgcctcgcgcagggtataaagcatcatttccgcgtctaccctgtttttcgcacagccaaggcttataattccaactttataagacataaacgacttccttatctgtttgcggctgcatgaaaacagcatccgctcaatattcttcctcggcgggggcgagctcctctaaaacaggcttgatatccccccagcggtatcccatacgctgtaaagccgcgacagtacgtctgcggcttttttcgtctgctgttttatttgcgtatttgcccttaaggagcgctgcaatctgctcctgcgcgggcacctcgtattccaaaaggatttcttctatcagctcacggccgacgcccttttcccgcagcttgtatgccgccgccgtgggggacaggtgttttttataaaccagctcctgcgcaaggcggcgcgcgtaggcttcgtcgtcgatgaggcctagctcctccatacgttcggcggcggcctgcgccgcctgctctgagcaggtgcgcctgattttatcggtcagctcctttttggagtggtcgcggtaagaaatgaggtttagggccttttcctttgcgcggcgtgtgtcagactggctgatgagctcatgcagcgcttcgtctgaaagctccgttcccggctttatatgccgttctaaaagagtctgtgtgtcgagcttcatagcaagctctccgtcaatgtagacggcgctcaggcccttcctgcgcggttcaatggcggtgatgagcatcagtcttccaccatgatgtcgatgcttgccttatttgttgccgcggcgggctttgcctccggcgcaggggcgggggctgccgcggcgacaggagccggcgctttgccgcctctgggcgctcttgcgcccgggcccattttatttacgagcaggccgatattatccatcagctccgcctcgattttagaggcgatgtctggattatcccggaaaaaaatcttgacgttgtcgcggccctggccgaggcgcacatccccgtaggagaaccacgcgccgcttttttggataacgtccgctttgacggccaggtcaatcagctcgccctcgcgggagattccgctgccgtacatgatgtcgaactccgcttctttaaacggcggagcgattttgtttttcacgaccttcgccctggtgcgcgagccaatcatttcgccgtttgccttgagcgtttcaatgcggcggatgtcgatacgcacggacgaatagaatttcagcgcccttccacccggggtgacctccgggttgccgtagactacgccgaccttttcacgcagctggttgatgaagattgcaacgcagttggattttgagatggctcccgcgagcttgcgcagcgcctgcgacatcagccttgcctgaaggcccacgtgggagtcgcccatttcaccctcgatttccgccttcggcacgagcgccgcgacggagtctacgacgattacgtcgattgcgccggagcgcacgagcgcttcggtgatttcaagcgcctgctcgccggtgtccggctgtgagacaagcagggaatctacgtctacgccgagcgccgccgcatacacggggtcaagcgcgtgctcaacgtcgataaacgcgacgttgccgccgtccttctgcccctgtgcgatgcagtgcagggacagcgtggttttaccggaggattccggcccgtaaatttcgataatccttcccctgggaaggccgccgatacccagcgcgatatcgagcgaaaggctgcccgtagagacgtgcccgacgttcatatgctcattttgcccaaggcgcatgacggcgccctttccgaattgtttttcaatctgggaaattgccgtttccagcgctttcgccttattatctgctgccatgctgtaatacctccgatacccgtaataggataagtgtttttcttgcgtttccaattgcaattataaccgatattcagaggaattgcaataaaaatagaacgttttttcgattgtttgccctgctgctgtttcatatttggaacagcaggaaaggaatggacaaagatattaaattttaacggcgctgatacagcggtcggttccgccgatatcctttacaaagctgatgccggaaaagccgtactccaagaaaattgattttaccggctgagcctggccctccccgacctcaaacgccataatgccgccggggcggagcaacggcgcccagtcctttataattgcccggtagaacagcaggccgtcaggcccgccgtcgagcgccattttcggctcaaaagaaatttccctttggagcgtgccgatttcttccgtttcgatatacggcgggtttgagatgacagcgtcgaacgccccccgctcaaatttgtgaaagtccctgaatacgtcgccctttacggcgcgcacgttcagggcgttgttatgccttatattttttttaagataaccgaacgctttgtctgaaagctcaagcgcggtaacgtcgctttgcggccgttccttggcaagcgttacggcaatcgcgccgctgcctgcgcacaggtcggcgatacggggacgggggacgggggacagcaattcaagcgcccgaagcaccgtggcctgcgtatcctcacgcggaatcaaaacgccggggccgacaaaaaactgccttcccataaaatcccaggagccgagcaggtactggagcggttcgccctttgcgcggcgctcgcaaagcaactgaaaacgggggatgccgcccgcaggagccgtctggcttccattcatgataagcccctgcctgccgatgccgaagcagtgctccaaaaggcaggacgcgtcaaaggcggggctttctatccccgcctgtaaaaacgtattttttgttttccggtaaagctccttgtatgtcatagcgttactttttcagaaggtcggagccgtcttccggaatgacgcatttcatcgctttgattgcgacctcaatcatcgtatcgtccggctcttttgtcgtaatgcgctgtgcccagaggccgggcgctgcgacaatccttgtaaacgcattgtcgtatttaccgcagattttaatcagctcatagccgagtccgcaggaaatcggaagcagcaatattttgaccgcgctgcgcacaaacgggttagtaaacgggacgaacagcccgatgatgatacccagaagcagcatgataatcataaagctcgtgccgcagcggggatggaaccggctttgcctgcgcacgttttcgaccgtcagctcttcttcgttttcataacagaaaatggtcttatgttccgcgccgtggtactggaatacgcgcttcatatcgctcatttgtgtacacaaaatgacgtataggagaaacaggccaatccgtaaaacgccttcaaatacgctgcggaacagcatgttgccctgtaaaaaagtggccgcgttcgaggtaatattataaagccatgtgggaagcacgaaaaacagcccgatggcgagcgccacgcctataacggaagcgaaaatcatcagcaccttcataaacttgtcgccgaatacgcggtcaatccacttttcaaatttggagggctgctcctgctcatcctccggaatactgtccatcgccttttcagccgaaagggaaagcgccttaaagctcaggcgcatggaatcgataaggcccccaacgccgcggatgaggggcacacggaatattttaaagcgctgcgcgaggcttttaaagggaaggtcctccgtataaatgtcgtcttctcccatgcgcaccgcaacggtcgtgcgtttcgggccgcgcatcataatgccctcaatcaacgcgctaccgccgatggaggtaatcctttttgttttatctgtcgccatattattctcctgtccggtctgccgcaagcggacaatccgatataatttatataaaagaaaatgacttgcctgcaatgacattataatcgtttttcagggacgatttgttaaattatcatgaatttcgcacagtaaaaaggaacaggcttacgcctgctcctgttcttcctcctcgtgtaaaacggggatagtaagcgtaacggtggtaccaatgccttccgtactttcaatatcgagcgagccgccatgaagctgcataatttcatccgcgaccgcaagcccaatgccggagccgcgcaccgtctggtttgctttgtaaaacttgtccttgatatgcggcatatgcactgccggaatgccgcagccgttgtcgctgatggcgattttgatgttgtcggcgtcgcttgttacctggatgccgatgacgccgcttgccggcgtgtatttcagggcgttgtccatgatattgataaagacctgcctcagcctgtttttatcgcccatcacaggcgggacatggtcgggctcgtcatagagcaaatgcttgttttcgcccagcgcccgttcacgcagcatatagattgcctcgtcgagctccgcgagcaaatcgattttatccatcatcagtaccatcctgccgctttggatgcgtgaaaagtcgagcagctcctcgacgatgcccgtcaagcgctccgattccttgacaatgaccgacatgcccttttccatagttttcgggtcggaaacaccgccgagctgcatcgtctccgcccagcccttgatggcggtaagcggtgtgcgcagctcatgcgagacggaggagataaaatcgtttttcattttttcagacgcggccagctcgtgcgccatataattgatggaatcggacagctcgccaatttcgtcgtcgtacattttatcgagctttgcgttgaaatcgccctgcgcaatccggtttgcggtcgcgctcatttcacgcaccggattgacgatggaacggataaaataagcgccggagataacaacgaaaaacgtgatgaaaagccctgcgagaataagcgccgtgatagccaggaaaattttgcggttggctgcctccagtgagacggcataccggaccgcgccgatgatttccccgtttgaattttggataacgcgggttgcggtcatgacctcttcgccggagcttaaatttccagtccataggccaaagccctcagggtcgtttttggctttctcatagtcgggcatggactgcgactcgtccggcgcaaagccggttgaggtaataatcacctttccgtagctgttgacgaccatcagctccatcagctctttgtccggaaaattctcaacgtattcacgcgcggtcgtgttgaactgctctgtatcggccgccgtgtagttgccaaaaaagttaacaagctcgttgcttcggccgctgatggtctgctggattccgttgtaatagaaggtctggattgaaaaggagagcacgacaataattgtcacaaggattgcaaggattacgccgagcgtgttgataagccagcggcgcgtaatgccctttttcacctgtggtcagctcccttctgaaatcatttctttaatagcccgcctggaacactcaggcgtcccatttgtagccgagaccccaaacggtcacgatatgcttggggttgctcggctcgtcctcgattttcatacgcaggcggcggatgtttacatcgacgattttttcctcgccaacatactggtcgccccaaacgtgcgtgaggatatcggtgcggtcgagggccgtgccgggattcgagaagaagtattccataatttgaaattccacctgcgtcagctcaatcatcttgccgtttttgagcagcgcgcggttcctcaggtttaaaacgaagtcgcctgacttcagctcttctttaaagttgttttcgtcgcgctgctgcgcaagcatgacccttctgtgcaaagcgtctacacgcgcaaccagctctgacggggaaaacggctttgtgacataatcgtccgctccaagcatcaggccggtcaccttgtccatctcctgcgtgcgcgcagtcagcataataataccgatgctcccgttgcggctcctaagctccttgcacacggcaaagccgtcgatgccgggcatcataatatcgagaatcgcgacgtcaaaatccccgcccatctcgtcatatttctggagggcggcctcaccgcagtctgcctccactacgtcatatcccgcccgcgtcaggttgattacaacaaagtcgcggatggttgcttcatcttcacataccaatatttttttcatttctgtccttcctttccagctgtgtcacggtgcgttgctgttaagcagctcaagattactgtcgatttcactcatgggaagcagcaggctcgagccctcctgcgggatattgaccgcgtaggtcagccccgagctgcccagcagctcgacaaacccgcttgtatccttgcgctcggaccagtccttttgggtgaatacctgtatggtcagcaggacgcttcctttactctgtactctgcccgcagtcttccattcataaaatgtcatggagcgcgcggtggtatcgatgcgtgccgttaccttgttcttccacttgtccgggagaataaagtaatagccgtcggttgcgttgataacggtttccattaccgtttgcagctttgcgtcctttgtgctgatagaattccagttcgtttggttgcagacggtttcgtccttttcaaacacctgctttttcatcagctcgacgattggaatctccattacgccgttgctgtcgatatccttgcagaccgtggagctgacgcgttccgtctggtttgtcggcatgtttttatccgatgtgtcataaagcgggttctttaatgaggaatccgcttcgttccaatacaaaacctctgtggtcatggtgctgttgggggaaatgccgtctacgaaaacagcgtttttaccatcggaagtccttcccttctggacacttgcgtagcgggtaacgctgttgctcatttctgtaacggaacggacaaacagcgactggacctccgggttgaactgcaaaagctttgcggtagccggaatttcagaggcgccaagcgacagcaggatgatgtcgtcatggccgtcgccggtcaaatcctccacaataagctgggagtaggtttcagatacggtatgctcggttgtatggttgccgttaaaggtataggcggtcatctggttgacgggcgcaacaaaattgctccagctgacgaccacctcgtttttgccgtccccgtcgaggtcaccaaggcatattttatcgacctccgtattttggttggcaaaatcgccgatttcctgccataccccgtctatctctttaataaacaggacgtgcgtcgcggcggaatcccccgccggcctgtaaagggcaatggcctcgggcgtcccgtcgccgtcgaggtctgtcgttgtaattgcggaatggtagtcgccgttctgcgggtatttcagcgtgtaatcgccgcccgcctttgcttcgatgacctcctggatttccgccttgtctcccgtggcgcggggcgggcgcagcaaatctgaattatcaaagcctgacggcgtgcagccggtaagcataaggcttgccaaaagcacggccaaaacggccgcggtaatctttcgtttcatgccccgtcctcctttccactgggataaccggtatttcaccggtttacggctatgcagtaataaatgggcttgcccatttccgtaaacattttttcgtgctcggtttcaatattgtccggaacctcgctgtgatgcaggtcgtctgtacggaatataacagaaaaccccgcctcgccaaagtagcagaggctgtcgtaaaaaagcgctttgtcatccgttttaaagcggatttccccgcctttcgccaaaaaggttttataaagatttagctgtttcgggaaggtgagcctgcgctttttatgcttggccttcggccatggattacaaaaattgatgtaaatccgctcgatttggtcgtcgggagagagcatttggtcaatccgctcgatatcctgcgacatcagcgcgatattatcgaccggccggccgttttcttcaaatagctttacaatattgcgccgtccaaccgcgagcacctcgcttttgatatcgaccgcaaggtaattgacgttggggttctgcagggcaagctgcgccataaacccgccttttccgcagcccagctccagctgcagcggctgtttttttggaaaccaccctgcccatttccccctgttttccgggggattatccacaaaaaagccgcacgcggcaagctcgggacgcgcccaaggctttcttctcatcctcatatgcttcaccataatgtaaacatgctcaaaatatcactttattatatcagggtttttctgtttttgcaattcccgtttctataaaaaggggggccttttcaaaacaaaaatccggcggaaccgtgaggctccgccggatgctttgtgttttttcagctaatcagcaggggcaaacgttgaccgctcttaccttgctgctgttcttcgggtcggcttccgtatcaaacgtgaccttctggccttcgttgagcgttttgtagccgtcggaagcaatcgcggagaaatgtacgaatacgtcgccgctgccgtcgtcgttggaaataaatccaaagcctttttctgagttaaaccattttactgtaccgttgttcattctggtacctccatctaaaaaattcatatccgttggtgcaatttaaagcgcgcacatttttgtaaatcatcaaaacgaaccatgacttacaaaaacatgcgcgcctaagatagcattttgaatacttttattagtataccacggcaaaatagaaaagtcaatgaaatattcggaaataaattttaagcttcctttgccgccgccaacagcgccgggctgcacagcagggatatttgttccgggtcgtcgggaagcgcaatcagcgcctgctttccgctcttaaggaaatagccttgcgccgtgcctgccggcccctctattttttgtacctggggagggacgcctgtggaaagcgccttggaaagcacctgcgccaggttgttttcatcctttctcgcaaggccgcccaccacaaaaacaatattttcatggctgaacgcttcgttcagagcgtccacaagatgcccgggggaaaaagcagcgctgacgtccacgggatttaacccggctgcagcaaggcagccggaaatcgctgtttcgcaatagccggtctggtgggccatataaaaaaccagtccgcattttatcatattaattcaccgtcttacttttcggtttaggtttactgtgccgcggccgtggcggcggtatcggaattaccggccccggcgtcggtaccgctgtccggcgcgcttgtcgaaggctgcgagctgcttgggggcggcacaggcgcatagacctttatgatacaggttgccgtcagcccgttgtccgtcgatgcggtaatcttagcggttccggcgcccttcgccgttacaaggccgtttgcatcgactgtagcggccgcggggtttgaggaacgccaagtaacggccgggtaggacgcgttagacggggaaacgttgaccttaagctgtaccgtcgtaccaatattcaggttatagcccgcccaattgaggccaatgccggtaaccggctggataaccttgacggtgcattccgcctggttcccgttttttgtaactgcacggacagtggccgtgcccgggccgaccgccgtaagcgtaccgttgcttgcgaccgatacgacgttaatattggaattataccatgtaacggatttatcggttgtatttgtgggattccattgtacggttattttacttttatcacccacgttcatcgtaacggaggaatagtcgaaaaaaatgttgatgttttcaattttctgaacgggcgcagcggttgccttttcagtagcaggctgtgtttcctcttctttttttgtgttgtcgtagagggtaaaagcgcgttccttgccctttagctttcccttgccgtcgtaccagtcgatttggccggccttatacgctttggaaaagctcgtgaccttcggttttgtaccgccgtaggtgttgtaatagacgtccggccacaaagcgtcggaattaatcgcggcctttttgacgtcgaccttggagctttcgcccttgcgcacctttcttgcgacgactaccgtacggaactcgctgaactcataggagcaggtggagagcgagagcagctggtcgttttcgttgacgtctacggggatatcaaacagggagcgctcgcggattaaatatacataattcataaactcggcgtcgcttgcaaacgtgccggtcaggtaatcgaagtattcgccctgtgattcgagcgtattcgttttataaacggaaataatcttccattgcgcgtcgccctcaggcgtatcgaaatggatgatagggtgctttttgtaaaaatcgaggtcgcccgaggtacgcccgtatcccatcaatcccgcaaacatgcggccgtcgttcatatggtggccgtggataataacatttttggagtcggccccctgcttgctgcggtagtcgataaacaggctcccgtagccgctgtaatttcccttatagtcggcatacaggtatttctgagtgctgatggtatcggtttttgactgcagcacggggtagtcgagataatcggtattgtcgattttcagccagccgactatttctttattcgttttcttgagcgcgtcccagtcgtgggaaatcgtattggtaacctcgccggttttggggtcggtttcctttataggttcgtccatgtgaccggtttcctgaatctcgtgaacggtattatcgttgagcatcggctggattacgaggtagttgattaggtatccagcagtaaaaaggaatgtaagcgacgcgacgattaaaacgattttgcgggcaatttccttgccgctgtcgccctttttggggattacgccgctccagaagcccttcttttttttcttagtgtcctgtgtaattggctttggaataaaagatacccccttttgcgtaagctccccgtccgggagcgggctgttcgtcagggcaaaataaacgccctgttttatcatctggccggcgggtacgcctgtcaggctttcttttggcagaagcacgatttttttgccgtagcagaaaaagcagtagccttcatagccgtttcccatgttgcccatggaaagcgcgttggcaaaggcgggagcggtggggtcctcttttgcctcttcctcccgctgcgcgggatagtccattgccatgacgaggtcgggcaggccctgctcgtgcagctccttaagcttttccctgtcgggcgtcgtatggtttgcggcaaggccgcagagcgcttcaaacgcggcgttgtcttctttgccgtcgagtgcgtttgccatgacgattaattcaatatcgtccttggaatcgattgactgattgattccttccagtattttgacacggtcggggtccatctctgtcttatagagaatattgacgcccgactggcgcagctcttccataacggagggcagcgccttgttcaatgactgcgtttcctccttgccgctgcgtaccgaatatatttcagcattcatggcatatacctcccgtattctgtcctgtatcataagcgcaggtgtgcgcggctttcctttatttcatataaccgattttcgtacaatatgtgttttctacagcgcgttcgattaactcctcgcaatccagctcctcctgcgcgagctttacaaatttcagcaccggccttgtgcgcgggtgcttgggcgtgaataccgtgcagcagtcctcgtacggctggatagaggtttcaaacgtaccgattctgcgcgctgtcttaatgatttcatccttgtccatcccaatgagcggacggaacacgggcatggagcacgcctcgtccgtacaggagatggcgtgaatcgtctggcttgctacctgccccaggctttcgcccgtaatcagggccgcgcattcgttttcccgcgcgattcgttcggcaatctgcatcataaaacggcgcatgatgatggtgaacagctcctccgggcagtttttacggatttcctcctggatttccgtaaacgggacggtatgcatgaccatcctgccgctgaagcgcgaaacaatcgaaaggagctccttgaccttttcttcggcgcgctcgctcgtgtagggcgggcttgcaaaatggacggcggtaagctctacgccgcgttttgccatcatataagccgcgacagggctgtcgatgccgccgctgatgaggatagccgcccgtcctcccgtgccgacggggatgccgcccgcgccgcgcagggcctgcccgtggatatacgcgccgaaatctcgtacctccaccgtgacggtcagctcagggttatgtacatcgacgcccagatgggggaaatgctcaagcaaatacccgcccagctcggcgcagatttgcggcgatttcagggggaactgcttgtcggaacgcttagcctctaccttaaaggtgcttacaagctccagctgctcctttaaatattccaacgcgtttatcttgatgctgtccatgcttttttcagcaaagcacgccctggaataggcggcgataccgaacacgcatccaatacggcgcgccgcctcgtcgaggtcggcgccgtccctgagcggcgtgacatatacggtcgattgtgccgttttgacttcaaacggccctaaatatgaaatgcttctttttatatttttgacgagcacgtcctcaaaggtgcgcctgttcaggccctttaaggcaagctcgccgacctttatcagtatcatttccttcattttttaccctcttcatccttcttttgcttttcacgctttcctaccgccttgcaagcgtgcgcattccttcatcgattgccgctatcaggcaatccacgtcggctctcgtgttatattttgaaaagcttacgcgcagcgcgctgtcgctttcctccgcggaaagcccgagcgccgtaagcacatggctcttcttcccttttgcgcacgcggagccgctggaaatatagataccccttgccgcgaggaaatggagcatggtttcgctccttatcccgagcacggagaaattgacaatatagggaaggcagcttccgtctgagtgcagaaccgtgccctcaagctttataacctgttcggcgcagtagtcgcgcaatgcgcggatttcttctatcgtgtttaaatcgatttcccgcacggcggctccaaagcccgcaatcagcggggcggcctctgtcccggggcgcagcctgttttcctgctcgccgccgaacatgcgcggcgtaatgcgcacgccgttttttacatacagcgcgccggtccccttcgggccgtgtattttgtgcgaggaaaccgtgagcaggtctattccaagcttacgcggcgaaaccgggatttttccaaacgcctgcaccgcgtcgcagtggataagcgccggcgcgcatttttgcacggcggccttccttgcggtttctaccggctgaatggcgcccgtttcgttgttgacgagcataatactgacgagtaccgttttattgtccaccgcttcaaaaatctgctccggcgtgatgcggccgccgtttttcggcttgaggaaaacgacctcgtatccctgccgttccagctccctgcagctttcaaagacagaggaatgctcaaccgcggtcgttacaattttattgcccatgcgttttcttgcgtccacagcgccgaaaacggccaggttgttcgcttccgtcccgccgcttgtgaaataaatttccgccttttccgcacagagcagcttcgctatggagcagcgggcctttgtaatctctttttcggcctccagcccttttgtatgcagggaggaagggttcccgtaattcagcgtcatcatgtcgtaggccgcctgcgcggcgctgcggcatacagccgtcgtcgcgctgttgtccagataaacgttcgtgcccgtttcaaacacctcttgcctcaaatataaaaacagaccgcaagtcacatatcattatacacgaaacgcccgcgcctgcaaataaataatagaaatttaacaaaatgttctaaaatcggaaatcaatatgattaagcaggcccaaacagggaataattgactgtgaaagggtgagtttacgtgaatgtatcaaagaaagaatattccaaaatgacagaaaaagcgtcgccgaacagccacctttttttagattgtctcaaggcgttcctgtttggcggcgtgatttgcaccatagggcagggcttcaccgatatttatatgctgtgcggcatgcaaaagaccgaggccgcgacgcttacctctgtgacgcttgtatttttgggcgcgctgctgacgagcgtcggcgtatacgacaagctcgcaaagcacgggggagccggtacgcttgttccaatcacgggctttgcaaactcaattgtttctcctgccatcgagtttaaaagcgaaggttatatccttggccttggcgcgaagatgtttattatcgcggggcctgttttagtatacggaattacggcctccgtcgtgtacggcattatctattttatcttaaaaagcgtgggtgccgtctgaatagattcaaacaaccttgccgggcgttgcttttgattcgaaaaaagaaaccgcagaggcgtttttgcttctgcggaattattttttcttttacataaagaatgtgaaaaaaacaggcgatttctcttgacaaactcttgacaatcaaataaaataagaaaatgcaccataatggcatagcttgcccttatcgccctttcaacgggttgatattagcataaaatttttcaaaaatcaagtggtatttttaaaaatgttgcggggccttatggaagacagcggactaactatcaggaatggagtgatacgcccatggtgaatgtcaagccgacaaagcttggtaaaaatgagaggatgagcttttctaaaatcgacgaggttatcgatatgccgaacctcatcgaggtacagaaaaaatcctacaaatggtttttagacacagggctgaaggaagtatttcaggatgtatcgggcataaccgattacaccggcaatctggttctcgactttgtggactacacacttgacgttgacaatcccaattacagcgtaacggaatgcaaggaaagggacgccacctacgccgcccccctgcgcgtcgtcgcgcgcctgctcaacaaagagacgggcgaaatcaaggaatcaaacgtctttatgggcgattttccccttatgacctcgagcggcacgtttgtaataaacggcgccgagcgcgtcatcgtatcacagctggttcgttccccgggcgtttattacaagatggaatatgacaagacgggcaaaaagcttttcagctccacggttatcccgaacaggggcgcatggcttgagtatgaaaacgacgtgaacgacgttttctatgtccgtatcgataaaaaccgcaaaattcccatcacggtgtttatccgcgcgctggggctgggaagcgacggcgaaattctcgactacttcggcgaggacgagcgcatccgcgcgacgatagaaaaggacccctgcaagaacacagaggaagcaatgattgaggtctaccgcaagctccgcccaagcgaaccgccgacggtggaaagcgcgcagacgcacatcaacaatctgttctttgacgccaggcgctacgatatgtcgcgtgtcggccgttataaatacaacaaaaagctcggtatttcggcgcgccttgcaaaccagaagattacggagccgattgcaaatcctcgcaccggcgaggtcatggcgatggcgggcgacgtaatcagccgcgagcttgccatggaaatcgaaaacgccggcgttactaccgcgtttgtagacgtggagggcaagacggtcaaggtcatttccaacggcatggtcgatatcagcgggtatgttgggtttaacgctgaggaagaatgcggcatcaacgagaaggtgagcttcgccgtgctgtgcgaaatcctagacgcctgcggcgacgaccaggagctgctcaaggaaaccgtcgcgcagcgccgcggcgaccttattccgaaccatattattattgacgatattttctctactattaactatatgaactgccttgcctgcggcttagggacgacggacgacatcgaccatctcggcaaccgccgcatccgcagcgtgggcgagctgctgcaaaaccaattccgcattggcttttccaggctggaaagggtaatccgcgagaggatgaccctacaggcgcaggatcttgataacctgtcgccgaacgcgctgattaacatccgcccggtcaccgcggcaatcaaggaattcttcggctcttcgcccctttcccagtttatggaccagacgaacccgcttgcggagcttacgcataaaaggcgtctttccgcgctcggccccggcggcctttcacgtgaccgcgcgggctttgaggtgcgcgacgtccactacagccattacggccgtatgtgcccgattgaaacgccggaaggtccgaacatcggcctgatttcgtaccttgcgacgttcgcgcgcatcaacgaatatggctttatcgaggcgccgttccgtaaggtcgataaggagacgggcatcgtcaccagcgaggtcgtttatatgacggccgacgtggaggatgaattctacgttgcgcaggccaacgaaccgctcgacgacgaaggacgctttaaaaacccaaaaatcaatggacgctaccgcgacgagttcgtggagcttgagcgtgaccgtttcgattatatggacgtttcgccgcggatggtcgtttccgtcgcgacggcgatgattccgttccttgagaacgacgacgcaaaccgggcgctgatgggctcgaacatgcagaggcaggctgtcccgctgatggtcacgcagtccccgattgtcggtaccggcatggaatataaggcgggcgtcgattccggcgtgtgcctgctgtccaaagaggacggcgtggtcctttccgtaagtgcggacaaaatcgccgtgcgctacgattccggaaaaatcgaggaattcaaggttacgaagttcatgcgctcgaaccagggcacgtgtattaaccaaattcctgtcgtcgataaggggcagcgcgttgtaaagggcgaggtgctcgccgacggcccggccacgaagaacggtgaaatcagccttggaaagaacgcgctgattggctttatgacctgggaaggctataactacgaggacgctgtcctcatcaatgaaaagattgtcagggacgacgtttatacgtctatccatatagaggaatatgaaaccgaggccagggacacgaagctcggcccggaagaaattacgcgcgacatcccgaacgtcggcgaggatatgctcaaggatttggacgaacagggcattatccacattggcgccgaggtacaggcaggcgatatcctggtcggcaaggtcacgccgaagggcgagacggagcttaccgctgaggagcgtctgctgcgcgccatattcggcgagaaggcaagggaagtcagggacacctccctgcgcgtgccgcacggagagtccggcatcgttgtggacgtcaaggtgttcacaagggagaacagccatgacgagctgcagccgggcgtcaataaggtcgtgcgctgctaccttgcgcagaagaggaagatttcggtcggcgacaagatggcgggacgccacggcaacaagggcgtcgtttccagaatcctccctgttgaggatatgccgttcctgccggacggtacgccgctcgatatcgtgctcaatcccctcggcgttccttcccgtatgaatatcgggcaggtgctcgaggtccatctgggctatgccgcgaaggcgctcggctggaaaatcatgacgcccgtgttcgacggcgcgcacgaagaggatatctttgaggcgttccgccaggcggggctgagcgaggacggcaagacatggctcaaggacggcaggacgggtgaatatttcgataatcccgtcaccgtaggctatatgtactatttgaagctccatcacctggttgacgataaaatccacgcgcgttccacaggaccgtactcgctcgtaacacagcagccgctcggcggcaaggcgcagttcggcggacagcgcttcggcgagatggaggtctgggcgctcgaggcttacggcgcggcatacacgcttcaggaaatcctgacggtcaagtctgacgacgtcgtcgggcgtgtcaagacctatgaatcaatcgtcaagggacagaatattccgaagccgggcattccggaatccttcaaggttctcatcaaggaacttcagtcgctcgcgctcgacgtcaaggtgctcgacaaggacaacgaggaaatcgacctcaagcagaactttgacgaggacgatgaaatcacggcggtaccggacagcgcgctcgctgaggacgaggttatgaccacgatggagggcttccagctcgaggatgatcccgaagacaacaacatgtttgacgagtcgtctatttttgaagaggaagaagacgatttaatcgatgattttgacagcgacgaactgtaaggggaggcttggtgaatatggagtttaacgtttttgaatcaattaaaataggacttgcttctcccgaacagatcagggattggtcgcacggcgaggtaaaaaaaccggaaaccatcaactaccgcaccttaaagccggaacgcgacggcctgttctgcgagcgcattttcggaccgcagaaggactgggaatgccattgcggaaagtataagagaatccgctataagggcaaaatctgcgaccgctgcggcgttgaggttacacgcgcgaaggtcagaagggaacgcatgggccacattgagctggctgcgcccgtttcccatatctggtactttaaaggcataccgtcgagaatcggcctgatgctcgatatttccccgcgcctgcttgaaaaggtgctgtattttgcggcttatatcgtaaccgacccgggcgacgccaggggccttacgaagatgcagattcttacagaaaaagattaccgcgaaatgcgtgaaaaatacgaggacgatttcgaggccggaatgggcgcggaggccgtgaaaaagcttctgtctgaaatcgacctggaacagctctcagctgagctgaaggaagagcttgaaaacgcgtccggccaaaagagggtccgcctcttaaagaggctggaggtcgtagagtccttccgcctttccggcaaccgcccggaatggatgatactggacgtcgtcccggtcatcccgccggatatccgcccgatggtacaattggacggcggccgcttcgcaacgagcgacctcaatgatttgtaccgcagggtaatcaacagaaataaccgcctgaaaaggcttctggagcttgaggctcccgatatcatcatccgcaacgaaaagcgcatgctgcaggaagccgtggacgcgctgattgacaacggccgccgcggcaggccggtcactgggccgaacaaccgcgcgctcaagtccctgtccgacatgctcaagggcaagcaggggcgtttccgccagaaccttctgggcaagcgcgtcgattactccggacgttccgttatcgtcgttgggccggagctgaaaatgtaccagtgcggcctgccgaaggaaatggcgctggagctctttaagccgtttgttatgaaacgtctggttgaaacaaaggtttcgcagaacatcaaggcggcaagaaaggccgtcgaacgcgcaaagcccgaggtttgggacgcgctcgaggtcgtcatcaagggccatccggttctgttaaaccgcgcccccacgctgcataggctgggcatccaggcgtttgagccggtgctcgtagagggcagggcgttaaagctccatccgctcgtctgtaccgcgtacaacgcggacttcgacggcgaccagatggctgtgcacgttccgctttccgcggaagcgcaggcggaagcacgctttttaatgctcgcagcgggcaacctcttaaagccctccgacgggcgccccgttaccgttccgacgcaggacatggtgctcggctcctattacctgacgctcgacaaggatggggagaagggcgagggcaaggtgttccgcaactttgacgaagccctcatggcatacgacacgggcgttgtcagcctgcacgcgaagataaaggtgcgccgcgagctcgaaatcgacggagaagtaaagacggcgatgattgaaacgaccgtcggcaagattatattcaaccgcccgattccgcaggaccttggctttgtagaccgcagcaagccggaaaacctttttgagctggaaatcagcttcctggtcggtaaaaagcagcttggcaagattatcgacaggtgcatacgcgtacacggtacgcaggttacctccaaggtgctggacgacgtaaaggcgcagggctttaaatattctaccaagggcgcgattaccgtcgccgtctgcgacgcggaaatcccgaaggctaaaaaagagattatcgcgaaagcggaagaggatatcgataccgtcacgggcctctttaaagagggtctcgtttcaaatgaggaacgctatgaaagcgtactgaaaatttgggaaaaggcgacaaacgacgtcacgaccgcccttcagaagaaccttgggcgctacaacccaatcttcatgatggctgattccggcgcccgcggcagcatgagccagattcgccagcttgccggtatgcgcggactaatcgcgaatacatctggtaaaacgattgaaatcccgattcgcgcgaattaccgtgaagggcttaacattctggaatactttatctcctcgcgcggcgcgagaaagggccttgccgatacggctctgcgtacggcggactccggttaccttacaaggcgtctggtcgatgtatcgcaggaggtcatcatccgtgaggacgactgcggcacacacgagggcatcgaggtattcgaaatccgcgacggcaaggaatccatagagagcctgcacgagcgtctgctcggccggtacctctgcgaggactttgtcgatgagaagacgggcgaaattctcgtttcccgcgaaactatgatgggcgacgaagaagcaaatatcatcgtaaacgccggcgtggagcgcataaaaatccgttccatcctcggctgccgcgcaaagcacggcgtctgccgcaagtgctatggctcgaaccttgcaaacggtatgcctgtcacggtcggcgaggcggtcggcattatcgccgcgcagtctatcggcgagccgggcacgcagcttactatgcgtacgttccatacgggcggcgtcgcttccgcggaggatatcacacagggccttccgcgtgttgaagagctgtttgagggccgcaagccgaagcatctcgccattatcagtgaaattcccggcgatgtacgctttgaagaaatcaagaacaaccgccacgcggttatctttaataaagagaccggcgacgaaaaatcctaccttatccccttcggctccagggtcaaggtggaagaaggccagacaatcgaggccggcgatatgattaccgaaggctcggtcaacccgcacgacgtgcttgccatcaagggtgcgcaggctgtgcaggattacctgattcaggaggtccagcgtgtttaccgtatgcagggtgttgacatcaacgacaagcatatcgaggtaatcgtccgccagatgatgaagaaggtaagaatcgaagacccgggcgacaccaacctgctgcccagtacgctggtagacaagaacgagttcctgagcgcaaacgaagagatttgcgcgcgcgtcgaaaatggggaagagggcctgcgggaagccacctgtacacagatgcttctcggtattacaaaggcatccctcgcaaccgacagcttcctgtcggcggcttcgttccaggagacgacgagagtgctgaccgacgccgcaatcaagggcaaggtcgacccgttgatgggactcaaagagaacgtcatcatcggtaagctcgttccggcgggaacaggtatgcaccgttacagcgacgtagagctggaagaaacgtacccggctgccgctgtgaacgaatacgaacaggtccaggtggaataacgggacgaaatacggcgaaaccaccacgccgtgtccccgcagttttcttccggcttaatttatgcgtaagcggaggttccggtagctgcccggagcacaaagtaaatagaaaattgcagttgcaggataaaaacaagccctccgcattacgcggggggcttcttttattgaatttaacgatttgcagaacgagttcaactatccggaaaattgttaaagggcggaattttttatggatgacagccgttaccggcatatgaaaggttaaataaatccgaatggattaaaaaataaagctttgaggtggttttgatgtcaaacaggattaaagacttaaggaaaagcagagggtttacgcaggaggaaatcgcggaatatctgggtattcaccagacgacctacggcagctacgaaaccggcaagctgaaaatcccgatggagtcgtgtgaaaagcttgccgatttttataaaacaagcctggactaccttttgggcaggacaagcaggataaagccgtataagaaatgacacgtttgtattaggaccaatatttgcccgggcaagcgaacgggcaaacaaaaaagggctgcggcatttctgccgcagcccttttaagccataaataaatgattattcgtcttttccgcagcactttttatatttctttccgctgccgcacgggcacgggtcgttcctgccgaccttatcctttgccgatttccttacagtacggtttactgtgtcggtgccgtcggagcttgtggccaagggctttgcaacctgctcgcgcttaatgaccacattgagcgggttttgtggctgctgctgcggctgctgtcccggcaggaccacctgatgtgctgcggcggcctgctttgccatctcctgctgtttgcgcgcgatttccgcgttgcgcttttgaatttctacaatacgcttgggcgcggcgagcaccattttaacggtatcctcacgaatggaggcaatcatctcgtcaaacatatcgaagccctcgaagcggtattcgacaaccgggtcgcgctgtccgtaagcacgcaggcgtatcccctgctttaactgctccatcgcgtcgatatggtccatccagtaggtatcgacattcttgagcaggtatacgcgctccatttcgcgcatggtctcttcggggaggatgctctcattttcttcataaaggtccatcgcttttttggtcagctcgtcaatgaggtcctgcttctccataccctccaaatcgtcgagcgtatagtgcaggtcgccttcatcgataagccagccgagatagaagtcgcgcaggctgcccaggttccagttgtccctcgtcacgtcgtcggggcagaaggtggaaacgttcttttcaatggtctgctcaaccattttgataatctggtccttgatattctcaccgtttaagacctggtcgcgctgcccgtagatgatttcgcgctggcggttcataacgtcgtcatactgcaaaacgttctttctgatggcgaagttgcggctttccaccttttgctgggagctttcaataatattggaaagcattttattttcaatcggcatatcgtccggcgcgtttagccgctccataacggccttcatacgctcgccgccgaacaggcgcatcaaatcgtcctctgtggacaggtagaacctgctcttgccggggtcgccctgacgtccggaacgaccgcgcagctggttgtcgatacggcgggattcatggcgttctgtgccgatgatgaacaggccgccggcccttcttacctcgtcggcctcttctttgatggcctctttatatttcttgttgagctcggcaaaggttttgcgcgcgtttaagatttcttcgtcttccgtgtcggcaaagccggtcgattctgcaatcagctcctcgctgaactgcatcctgcgcatttcggttttcgccatgaactcggcattgccgccgagcatgatatcggtaccacggccggccatgttcgtcgcaatcgtaacggctccctttttaccggcctgcgcgacgatttcagcttccttgtcatgctgctttgcgttcaatacgttatgcttgatgccctttttcttgagcatggcgctcaagtgctcggatttttcaatcgaaatggtaccgaccaggacaggctgccctgtctcatggcattcaataatatccttgatgaccgcctcaaacttgccctgctctgttttaaagatggaatccggcaggtcttcacgtaccatcgggcggtttgtcgggatttccacaacgtcgagcttgtaaatctcgcggaattcctcctcctccgtcatggccgtaccggtcataccggaaagctttgtatacaggcggaaatagttctggaaggtgatggttgcgagtgttttgctctcgttttcgaccttgacgccttcctttgcctcaattgcctggtgcagcccctcgttgtagcgcctgccgtacatcaaacgcccggtgaactcgtcgacgatgatgacctcgccgtccttgacgacgtagtcgatgtcccgtttcataatgccgtgcgccttgattgcctggttgacgtggtgctgaatcgtcaggttgtcggggtcggtcaggttttcaatgccgaaatactgctccgcctttttgacgcccaggggcgtaagtgtcgcggactttgccttttcgtctatgatataatcgatgcctttttccttgtaaagctcatcgttgtcctctttgctgtcggtctctgtaaagcgttcagcctttaatgttttcgccagcttgtcggcacgctcgtaaaggtcggtcgatttgtcgcccgcgccggaaataataagcggggttctcgcctcgtcaatcaatatggagtcgacctcgtccacaatagcgtaggcatggccgcgctgtaccttattttccttataaacgaccatattgtcgcgcaggtagtcgaagcccagctcgttgttcgtgccgtatgtaatatccgccgcataggcttcttttcttaaatcgttttccatgtcgtgcacaatcagcccgacagaaaggcccaaaaagcggtaaagcttgcccatccattccgagtcgcggcgcgcaaggtagtcattgaccgtaacgatatgcacgccctcgcccgtcaagccgttcaagtatgccggaagggttgcaacgagcgttttgccttcacctgttttcatttcggagatacgtccctggtgcaggacgataccgccgataatctgaaccgggaaatggcgcatgccgagcaccctgtcggaggcttcccggcagacggcaaatgcgtcgggcagtatatcgtctgttgtttccccgttatttaaacggttttttaatatatcggtctgttccttcagttcgctgtcggacatcgccttatacttgtcctccagggacagaaccttgtcgcaaaggggctgaatccgtttgacttcccttttgctgtagttgccgaacattgcttttaaaaaattcatggcaatcgatcctttccatcgcgcgcagcgccggctgcgccttcgagatgctcacgcaggagcttttaatttacttacctgcacaagtcaaattattatagcatacttttttcaaaaaatcatccattattttgtgaacaggacaaaaagaataccggacggaagcaagctccggccggtatgaaaagctgtcagtcctggccgcgcagggaagcggcggcggcctccatcgccgcaacagcgaccggcccggcggtggaatatccaagggaacccttttccacgacgaccgcaaacgcaagcggcgcgtcctcgtcgcgagagaagccgaccatccacgcgtcgttgctgtccgggtcgccgacctctgccgttcccgttttggcgcagacctcaagggacgggaacatgccgtcgccgtagttcgacgtaacggtataccgcatcatttcgtttaaggtatccgccgtgtttctgctcaaaagttccctatcggctgatgcgcccggcgcgcgtacgggggaaaagtcccctttataaatatccgacacaaaataaggctgcaccgattgcccgtggtttgcaaccgcgccgcacatgattgccatctgcatggggtttgcaaggtcggtatactggccgataccagaccatccaaggtcgttgtcctgcgccttggaaacgtcgtattttccttttacagtaggcgtgttgccgacattgaagctttgggtaatgccaatcttgtttgcctcttccgtcattttttccttgccgatttcgacggcaagctccgcgaataccacattgcacgactgcgcaagcccgtcgcggaaattgatttccccgtgatgcgacatacaggagatttcctcgccgtttatcacgacgcctccattgcaggtaaacgttttgtcaaagacgtccggcaaataatcgattgcggcggccgccgtcaccagcttgaaggtggagccgggcgtataggtgctcgaaagcacgcggtttaagtacgcgcccttgtactggtcttcgttgtcctccgtaatttcaggcgggtcctgcgggtcataggtggtggagcttacgttacagatgatttcacccgtcttgtagttgaacacaacgaccgcgccgtgggcgccattaagcgcctcgtacgccgtcctgcacacgtccgcgtcgatggtaagcgtcaggctgtttccaccccggaaggacggcggcatttcaagcccccatatataatcgaagcccagcaaatccgaacggtacatgctctgcaccgccgtagaaatattcaggctgttgtcgcccactacgtggagcgtcgcaaggcgcgtattcaagtcgtcattataatagcgcttgccgtccttgctctgcgccatcaccttgccgttgcggtcgtacataattcccgcctgctcaagccccccgctgccggagatatgcccgttgtaattctgctgaatccatccgccggcgtttgtgcagatacggaaggtaaacagggcaagccccccaaagaacgcgagcgttataataaaaataaagatagagcgtgtcaaagcctttttcaaaatgccgcccctttcctgccgggtacccggcctttactgcgttattctgcgtttggtggcataggtgcgctcgtccgccgccttgataaacgcaagcagcccccagcatgcaatcatgctcgaaccgcccgtgctgataaacggaagcgtaacgcccgtcagcggcaggatatccgttgcgccgaagatattgagcattgactgtaagacgaacagccctgccgcgcagcaggccgatacggaatagaaagtcgaacggctgcgcgtcgtgatggcgcgcgcgtagaagaacagcgcgccgattgcggccgcgacagtcagcgccataatcaggccgacctcttcgcacatcagcccaaagacgaggtcgctttccgaagccgcgacatattttaaataaccgttgccaagccccacgccgaacagcccgccgcttgccgcgtaggtaagcacgcgcgcttgctggtagccggtcgtgttggaatattcccacacatgcccccacgcctcaaaccggtttgcgatatacggcttaaaccgcaggataatcgccccgccgaacacagcggacgcgaccgcgaggataaccgttttcaaatcgcctgagcgcatgaaggaaatcatcaggaaggtgccaaaaaagataagggccgtaccaaaatcgctcatcaggaaaagggcgcccacgcagatggcggagaatataataaattcaatcaggttgcgtttcctctgcaattggtcgagcgccgacgcgccgacgaagataaaagcaattttcacaaattcagacggctggacggatacgccgccgataacaatccagttcgccgcgcctccgcggatggtgccgaatatgatgttaattccgagcaggccgactgccgctatcataataaaccagcgccatttcgtgacgcggtccgggttttcgataaacttgattagcaggcagaaaacaaccatgccgacggctgctgcggctatctgcacgaaggtctgccgtatctcctgccgtaccgagagcataacgcctacccccgaaaggaaaatcgcaaggctctcaagctcaaacccaacgcgccgcagcgctttggtggaaaccagataaaaaatccaggcgaccgccataaagcagccccagatggctagcggcatgaaatcggtaatttccgtgctgacgcaggcctcggacgccataaacagcaggaatatgctgatgagcatcatcagggaaaacggcgagatgcccgccttgcttcccggctttttaaagaaccaggatttgctgatgtcggtataatcctccgcgcgcctgagagtaagggctgtccgcccgaccttgatttcatcattgatgtaaacaggcgtgcgctcttccacgcgtttgccgtttacaaacgtgccgtatttcgagccggtatcgctgataaaccagcctgcctcacgccgcagcaaaacacagtggtcgcgcgaaacggccatgtcgccgagcgtaatgtcgcagctgcggccgcgccctattgaattttcccacgcgagcacgggcaggcaatcgtcgttttccttgttgacaagcataaccagcggcttttcatccctgcgctggcggcgcatcgaggaatagcactggaacaccaccacgattccaaggataggaatcagaacacgcaggacgactatggcaaggtccgtaatgacctggaaattaagcgagtccaaaaaagcgtccaatcggctttccgcctccttttttctacaggagatatttttctgataagatgataatatagttttggggcggaattgtcaatagaaggaagatgacagtccggttacagaagggtacaaaaatcccctgtgccaaaacgcgccgcggcacaggggagcgctgtttataccacttttttcagacggtgaatcaggagcgtcgctgcggcgattttcgcggcgtctccgattaagaaaggcacgacgcagaccatcagcgcttccaatattccggttccggtgctgattacaaaccatgccgtaccgaacgtgtagcagagcgcaaggcccgcaataatggatgggattaccgtatggatttttttgccgaaccgcttgagcagcagggaaatggtaagcgccgcaacaatatacccaacaatatagccgcccgtcggcccggcaagcacggcaaacccgccgcggaaaccggagaacaccgggacgcccacggcgccgagcagcaggtaaaccacttggcttaaaacggcgcgcccggggcttaacagccctgcggcggtaaaaacggcgagaagcgcaaggttaaccggcacagggccgatggggatagaaatttgtgagaaaacggcggtcagcgccgcgaacagcgcggtaataataattgcgtatatttttgtgcttttcattggctttgtgttatccatcatattatcctccttttgataggaacagtatatctctttctgctttgattgtcaaccaattaatttgtattattggtttacaatttaaaaatagaaaagacgccggaagtaaatccggcgccttacggagcgttaaattattcgactgtgaccgattttgcaaggtttctgggcttatcgacgtcgttgccgcgcagcaccgccgtataataagcaatcagctgcagcgggacggctgtaagcatcggggtcagaagctcacacgtttttggaatccggaccaggtaatcataggcttcctcatccacgctgaaatcctcacggcacaccagcacgacttttgcgccgcgcgccttgacttctttaatattgctgacggttttttcaagcagcacggcctgcgttgcgacggcgataaccggcatgtcatttgtaatcagggaaatcgtgccgtgcttgagctcgcccgccgcgtatgcctcggaatggatgtatgaaatctccttgagcttcaacgagccttccatactcagcgcgtaatcgagccccctgccgatatacagcaggctgtcggccgttatgagctggttcgatataaactggacgtcttccttgtcgttttcgagaacctgttcaatcagggcgggcgtttcgagcagcgccgccgtaagctcacggcactttccctcatcgataatccccttcgcgagcgcaagctcaaacgcgaacaggtacatgacggaaagctggacgatatacgcctttgtagaagcgaccgcgatttccgggccggcgtgcgtataaatgagcatgtcggcctccctggcgatggagctgccctttgcgtttacaatcgcgagcgtctgcgcgccaagctttttggcaaggcgcatggcggccaggctgtctgccgtttcgccggactgggagataatgatgacgagatcgccctccccgacgagcgggccgcggtagcggaactccgacgcgatgtccaccgttacggggacgcgcgcgagcttttcaattacatattttccaaccatacccgcgtgcatcgcggtgccgcaggcgacgacatggatgtttttgtactccgtaagcttttcgggcgtaatcccgcattcctccaggttcggcaggccgtctgtgatgcgcggctttaccgtcatattgatggaggtcggctgctcgtggatttccttaatcataaaatgctcgtagccgcacttttccgccgcgtccatatcccaatccgcggttttcagctctttttcgacaagctggtggtgcgtgtcgtaaatattgatttcgtcgtgcgtcagtacggcgatttcatcgtgctcgagcaggtaatagtcctttgtatatttgaggatggcgggaacgtctgacgcgataaagctttcatccttgcctacgccgacaatcagcgggctttccctgcgcacggcgtaaaccgtatcggggaaatcctggaatacgattcccagcgcaaacgaaccctccagctctttgatgacatggataatcgtatcgatagggtcgccgtcgtagtagtagcccagcatctgcgcgacgacctccgtgtcggtatcgcttaaaaacacacgtcccttgcgcaggaggaattcctttaattccttgtagttttcgataataccgttatgtacaatcgaaaccttttccccgctgtgggggtgggagttgcggtcggacggctcgccgtgcgttgcccagcgcgtatgcccgataccggccttgccctgcggcctgccctccttctccattttcgcttccaagtccttgagcctgccctttgatttggcgaccttgatttcgccctcgtcaaatacggcgatgcccgcggaatcgtagcccctgtattcaagcttggaaagggcgcttacgagcacgtcgctgcagtccctgtagccgacataaccgacaataccacacatacctttttacctccatatagaaaaatcgcaccgcttgatatttattcagacggttcctgttttatgtcatttgctaaattttcctgtgcctgctttccgtttgtaacgtggtggaacgtcgggacaatatcgcttaatacggaaagcgttttgtccgaatcgtttgcaagcgcggattttttgagctttgtcagcttttctataaattcccccgaatcgatgggaatctggtttccaataaaaattttcttgttcgcggtagccttgagcccttcctcgtccattaaaagctcttcaaagagcttttcaccgggacgaaggcccgtgaatttgatttcaacatccttgtagggcaccttgccgtacatgcggataaggttttccgcgagcgtcgttatcttgacaggcgcgcccatgtccagcacgaagatttcaccgccgtgcgccatggaagccgcctgcaatacaagcgaaacagcctccgggatggtcataaaatagcggatgatgtcgggatgcgttacggtaatcggccggccggtttcaatctggcgcttgaaaagcgggataaccgagccgttcgagccgagcacgttgccgaagcgcgtcgtaacaaattccgttttcgtgttgccgaactgcgccatatactgcacaatcatctcgcagcagcgctttgtcgcacccatgacgtttgtgggattgaccgccttgtccgtggaaatcatgacaaatttctctacattataaaattctgaaagggacgccacgttgaacgtgccgatgacgttattcttgaccgcttcctccggggaggtttccatcaacggcacatgcttgtgcgccgccgcgtggaacacgagctgcggcttgtacttttcaaaaacgagcttcattttttcgtagtcgcgcacagagcaaatcagagtaaccaggttgatgtcctcgccgtgctccattaacagctcctgctggatgtcgtaggcgttgttttcgtaaatatcgacgatgataatctgctttgggccgtatttcgcaatctggcgggttagctccgagccgatggagccgccgccgcccgtaatcatgcagaccttatctttgataaaggaacggatatcctttttgtcaaaggtgataggctcgcggcccaggaggtcctccaccttgatatcggaaatctggtgcaggaggttcagctggtcgccgtcgaaaaacagctggcttaaatacggcacaatttttattttgcatgaggtttccgagcagaggtccaggatataacgccgttccgcctcggtgcaggaggggatggcgaagataatcatatcgatttgttcttccctgcacaggtcgatgatatcctcgctcgtacccattacgcggatgccgcgcacctcggattttaatttttttgggtcgtcgtctacaatgcaaatcggcaggtattcgttcgacgggttgttcgggtccttttttgcgttttctatttccttcaatatcaggttgcaggcctggcccgcgccgacaatcagcgtcctctttttcagctcgctctttccttcgtctaccaaaacgaggaacgttttgcggaagaggatgcgaaacagcacaatccccacggttcccatcagaaactgcatgcaaaagtaaatcaggttgggttcgctgaagatgaggtaggataggaagaatacgacgatgctgccgagcgccgtccccgcaaagcaggaaatatagtccttgagcttaaaataccgccaaagctttgagtatgcgccgctgactaacaaaaacgcaaagcataaaataatcagcagtatggtgatgacggcaagctggacgggacgcatgattttcgcgccggcgtcccccagaaaattaagaaggtagtaggacagaagggagctgacgccgatgacaaacatatcggacaaagcgagaataatttttctcgaattgattttcatcatttttaaacctcgattaataggcgcagcttcattttacatagaaaaaacagcggcgcgtaatacccatacgttgggaaaaccggcagacggtgcccagaatggaacaggtacaataaattaattatagtgtatcctgtataaaatgtcaataatacacaaaaactgaacttacaaattcgtgtacatgtgtgttgtttatatgaaaaaaagaaaatcagagtttacggcccatgagcacgcccatgacggacgccatcatcaagccccttgtccatccgctggagtcgcccaggcagtgcagccccctgatgttggtattaaagtccttatccatcttgacgcggttgctgtagaatttgagctccggcgaataaagcagcgtttcggtactcgcaaagcccgggaccacatggtctaccgcctggataaaattgatgatgttcatcatcgcgcggtagggcatggccgcggtaatatcgcccgcgacggcgtccggaatggtgggctttacgttcgattggcttaattccttcggccaggtgcgcttgccgtccaatatatcgccatagcgctgcacgagtatatggccgtttgcaagcatattggtgagctcgccgaccttctgtgcgtatgcgataggctggttaaagggctcggtgaaattgtgcgagcacaatatggcaaggttcgtgttgttcgatttgatatccttataggaatggccgttgacaactgctaaattgttatcgtagttctcctggctgacaaaaccgccgggattctggcagaaggtgcgcaccttgtttttaaagggcttcggataaccgatgagctttgattcatagaggacctcgtttacctcctccataacctcgttgcgcacctcgatgcgcacgccgatgtccacggttccgggctggtgcgcgatgtcgtgctccacacagaccttttccagccagtccgctcccttgcggcctgtcgcgacaattatattttccccgtttattgtaagcgtttcgtccctttcgtatacgttctgcgcaacgacgcccttacatacgctgtcctcaataatcaaatcgcggcacgcgtagccgaacaggatttccactccgtgctccagaagccagctttcaatacttttataaagcgtctgcgccttttccgtgccaagatggcggatggggcagtccacgagctttaagccggactggattgcctttttgcggatttccttgaccttttcctcctgcccgacgccctctaccttcttagacgcgccgaactccaggtaaatctggtcggtataatcgattgtttcctgcgccaaatcctcgccgatgagcgtcggcaaatccccgccgacctcgtagctcagcgagagcttgccgtcagagaacgcgcccgctccggaaaagccggtcgtaatgtggcagtacggcttgcagttcatgcaggttttggtcttgagcttagggcagctgcgtttttcgacagggcgccctttttcgagaatgacgatttttttatgtgtgccgcgcttgaccatctcaattgcggtaaaaatgcccgccggccccgcgcctacgatgataacgtcgtaattcatggtgttaccatacctttcgtttcaaacctgtatttttcatttaatatcgggcagggaagaggcatacgccttaaactcctcatagcttccgtgcttaatctgtgagaggtccgcgccttcgtccgcaatcatgcagtcggtaataagatacgtgtcgattccaagctttcccgcgcacatgtcctcgcgcaggtcgttgccggccatcaggcagtcgcgcgcttcaagcccggccgtttgcagcagggactcgtaatatttgaggtttggcttgctgtaggagcatgtttcgtacgtagtaatcatttcaaacatatcggggtctacgcccgcccagcgcatgcggttcaacgtcccgtccttcgggaaaatcgggttggtggccgcaatcaggcggtagcccttgtccctgaggattgtaaggcactgcgcggcaagcggcgtaaagcctgttttcttctgtacgttgttgaattccttgcggtaaaattcgtcgaactgcgggcgcagctttaaaatatcctctcccatcaggccggcaaaggttttccagaagcgctcctcgttcgtcatggagccgtcgttttttatcatttcccttgtgcccgcccatacgcattccacaagctttttcccgtccagcccaaatgctgcaaatttttttgcaagctccgaaaaatagccgtgcgcaaagacgtcctggtccatagggagcatcgtcccgtccaggtcaaaaaggactgtattcatagcggcctcatccttcgcataaaaagtctataatataataccatagatgcggtcggatttatagattgaaaatcatgctttttttgacaggggcttcccgcttttttaggtaaatatacataaaacaggcggattttcaaataaaaaaaggaaattggaaaccgcggcgcgcaaacgcataaaaatgcggaagaaatgggataaatacttgacacgggccgcggcgctgtctataataaagcttatatgtaaacatctaaattgtaaaatttgaatgaggataggcgcatgtgtaacggcgtcctgtaaattaaccgtaaagggtggtaaagccatgcagaaacaggtattgcttacgaacgagggtcttaagaacctggaggacgagcttgatatgctcaaaacagtccgcagaaaagaaatagcggaaaaaatcaaggttgcgctttccttcggcgacctttcggagaacagcgagtacgacgaggcgaaaaacgagcaggcgatggtggaatccaggattgcaaccattgaaacgatgctcaaaaacgttaaaatcatagatgaaaatgatatcagcacggaactaatccacgtcggctccaaggtgaaggttatgaaccacaccgccggcagggaaaatgtataccagattgtcggctcaaacgaggccgaccccctgaaggggcgcatttccgacgaatcgccggtcggcaaatttttgctcggcaaaaaggtcggcgagcgtgtttcggtggaaacaccggcgggcgtgagcgagtacgaggtgctggaaatcagcaagtaacgcagagcttttaaatgaaacgggcgtgcccccggcacgcccgtttgcttcttaacccaggatatgaggaggacgtaaagatggcagagaacacggccccggcaaacagcccggaggcagagcaggatttaagcgagctgctccaaatcaggagggacaagctcacggcgctccagcaggagggcagcgacccgttcgaggtgacggtgagcaggcgcgacacgctcgcgcaggaaatccgcgacaattttgaaacgctcgaaaataaggacgtctgcattgcgggccgcattatgagctggcgcgatatgggaaaggcaacgtttatcgatatccacgaccgcagcgggcgcatgcaggtgtatatcagaatcaatgatatcggcgaggaggcctacgccaatatgtccaaatgggacattggggatatccttgaagttacgggctttgtattccgcacgcgccggggggaaatctccgtccacgcaaaggaggtaacgctccttgcaaagtccctgctgccattgcccgacaaattccatgggctaaaggatacagacctgcgttaccgccagcggtacgtcgatttgatggtaaaccccgaggtgaaggatacctttgtcaagcgcagcaaaattatcaagaccatccgccagtgccttgacgacaagagctttatcgaggtcgaaacgcctattttgaataccatcgcgggcggcgccgcggcaaggccgtttattacgcaccataatacgctggatatcgacctgtatttgaggattgcgcccgagctttacttaaagaggctgattgtcggcgggatggagcgtgtgtatgaaatcggcaggctgttccgaaacgagggcatggacgtcaagcacaatccggaatttacaacgattgagctctaccaggcgtacaccgactacaacggtatgatggatattacagaggagcttatcaacaaagcgtgccttgcggtcaacgacacagaccagattacctaccagggcgaggaaatcagcctcaagctcccgtttgcccgcatgacgatgatagacgcggtaaagcaatacgcgggcgtggatttcggcgcgtttacaggcgacacggaaaaggcaaaggaagctgccgaaaagctccatctggaagtaaagaagacggatacctggggcaacatcctcaataccgcgtttgaagaatatgtcgaggagcagcttttgcagccgacgtttatttacgattaccccgtcgaggtctccccgcttaccaagcgcaaaaaggggactccggagcttgtagagcgctttgagctgtttataacgcgccgcgagcttgcaaacgcgtacacggagctcaacgaccctattgaccagcgcgggcgctttgagcaccaattaaagctgcgtgaggcgggcgacgaggaagccaacatgatagacgaggatttcatcaccgcgctcgaatacggcatggccccgaccggcggcatgggcatgggcatcgacaggctcgtcatgctgctgacagacagcgcttctatccgcgacgtgctgctgttcccgacgatgaagcccaaggactgaagcttctgtggctttttttcgcgtcccggctgacgaaatcgcggaaatccggccgcatacaacatgtatgccccctttttcgcgcatcccattcatttgcctgtgaaaaatcttttggaggcttatacgaattctggtctttccagatttttataaaacgacgtgtcgatttatagaaataggaaaacggcgtgcggcttgaacaattggtacgcttaagtctgaaaccagtttatcaaacatatcctgtgcggggcgggtttcccgccccgcgtttacatagcagaacgataccatatcccatttattatgtatatgggacaacaaccaaacatgacaggaggtcatacgaatgaaaagcgataaaattacaaaatcgactaacgcggcgccgcagaggtcgctgcttcacgcgctgggacttacagacgaggaaataggcaagccgctcgtcggcattgtcagctcaaagaacgacatcgtcccgggccacatgaatctcgataaaatcgaagaggccgtcaagctgggcgtatccatggcgggcggtattcctatcgtgttcccggccatcgccgtatgcgacggcatcgcgatggggcacgagggcatgaagtattcccttgtcacaagggagctgattgccgactccaccgaggccatggtcaaagcgcacgcgttcgacgcgcttgtgatgataccgaactgtgataaaaacgtcccggggctcctgatggcggcggccagggtaaacatcccctgtatcttcgtaagcggcggcccgatgctcgccggtacggtcgacggcaaaaaaatcagctattccacggtttccgaggctgtcagccgctataaggtcggcgaaatagacgaggagaagctcaatgaaatcgaaaacaaggcatgcccgacgtgcgggtcctgctccggcatgttcacggcgaactccatgaactgcctgacagaggtgctgggcatggggctaaagggcaacggtaccatcccggctgtttattcggagcgcctgcgcctggcaaagcgcgccggcatgcaggtgatggagctttataaaaagaacatctgcccgcgcgacattatgacgcaaaaggcgttccagaacgccctgaccgtcgatatggcgctcggctgcagcacgaacagcatgctgcacctccctgcgattgcgcacgagtgcggcatagagcttgatttaagctccgcaaacgaaatttccgcaaaaacgccgaacctctgccatttagcgcccgcgggcgaccacttcatcgagcagttgaacgaggcgggcggcgtgtacgccgtcatgcacgagctttcaaagctcggcctggttgaaacgggccttcccacctgcacaggcaaaaccgtgggagagaatattgcgggctgtgaaatcagggatacggaggtcatacgccccgtgtctgacccgtacagcaagacgggcggcatcgccgtgctcaagggcaacctggcgcccgacggctgcgtcgtcaagcgcagcgcagttgcgcccgaaatgatgcaccataagggcagcgcgcgcgtgttcgactgcgaggaggacgcgctggacgccatctacaagggcaatatcaacgcgggcgacgtcgtggtcatccgttatgaggggccgaagggcggccccggcatgcgtgaaatgctcaacccgacctccgcgattatgggcagcggccttggaaactgcgtcgcgctcatcacggacggcaggttctcaggcgccacgaggggcgccgcaatcggccatgtatcgcctgaggcggctgtcggcggcaacattgcgctcatagaagagggcgataccatcgaaatcgacatcgacagcaacacgattaacgttttaatatccgatgatgaaatggaacgccgccgcgcaggctggaagccgcgcgccccgcgcattacaagcggatacctttcccgctacgcaaagctcgtgacctccgggacaaaaggcgcggtgctagagtaaagttcctgtctaaataggaggaagcctgtaaaaaaacgctttgtttttgtgcagggtacacaattcaccccttgtattattgttacaaggggtgaatttttcatttttagggaaattcatttgaataggtttggcaattctgctataattagaaagcgattacttctgtaattgtaaaaattgtcttaatttggcgaatttattttattccccacgggcaagcgaaaggagttacccctattgaaacagtatgacgcaaaaaagattatgaacgttgcccttgcaggccacagcgggtcaggaaaaacctctgttgcggaatctatgatttatcttgcaggagcgtccgacaggctcggaaaggtcaatgaaggaaataccgtactggattttgatccggaagaaataaagcgtaaggtttccgtcgtaacggcagtcgcgccgatcgaatggaagggatacaagataaacctcatcgacacccccggcctgttcgatttcgcgggcggcttgtgcgagggtatgcgcgcggcggacacggcgctgattgtcgtgtcgggcaaaaacggcgtgaacgtcggtacagaaaaggcggtcaagtctgctaccaaggccggacgcaccaaggtgttttttgtaaacgggctgtgtgacgaaagcgcgcgcttctaccgcgtcttcgaaacgctcaaggcgtcctttgggccgtctgtctgcccggttgttgtgccttatatcgtggacggccaggcaaactgctacataaacctgctcgaacaccgcgcctacctgtacgacgaaaacggcaaggtcacgcagaccgccatgcccgacatgggcgacaggctcgaagggctgcgcaccgcaatcaacgaggcggtcgcggaaacgagcgacgaaatgtttgaaaaatatttcagcggcgaggaattcacgccggaggagattattgtcggcatcagccagggcgtcaaaaatggtaccatcagccctgtattctgcggcgacgcacagaacacgtacggaatagaccagctgttaaacggcctttcgtggcttgcgcccacggctgacgcgggcagcgagctcggtgtagacaccaacggcgacccggtcgagatttccgtcaatgaaagcggcgcggcggcggccgtcgtctttaagacggtagccgacccgtttgtcggcaagctttcttactttaaggtaatatcaggcaaggtatctcccgaaacgccgcttatcaatatgcgtacaggcaaccaggagcgtattggcaaggtcatggtcatccgcggcaaaaagcaggaggacatggcgtatatcggcgcgggcgacatcggtgccgtggcaaagctgcaaagcaccaacacaggcgacacgctctgcgcgccgacccgcaaggttatcttagacccggtcgtatatcctgcgccgtcctattccatggcaatcctgccgaagaacaagggcgaggaggataaggtcgcccaggcgctttcaaggattatagaagaagatccgaccataaagcttgaaaacaatacggaaacccaccagatggtcatctccggcttgggagaacagcacctcgacgtcgtggtatccaagctcaagataaaattcggcatagaggtaacgctcgagcagccgaaggtcgcatacagggagaccatccgcaagaaggtacaggtacagggcaggcataagaagcagtcgggcggacacggccagttcggcgacgtctggattgaatttgaaccctgcgacagcgacggattggaattcgcagaacgtgtcgtcggcggctccgtcccgaagggatttttcccggcggtggaaaagggcctgcgcgactgcatcaaaaagggtccgcttgcaggctatccggtagtcgggctcagggcgacgctctacgacggctcgtaccatccggtcgattcttccgaaatgtcgtttaaaatggcggcggccgtagcttataaaaacggaatgccgcaggcaagccccacattgcttgagccaatcggctcgctcaaagcaactgttcccgataacaacatgggcgatatcatgggtgaggtcaacaagcgccgcggccgcgtgctcggcatgaaccccggcgaggacggcatgcaggtcgtcgaggccgaggttcctatggcggaaatgcacgatttctccacctatatccgtcaggtcacacagggccggggcagctttacctttgaatttgcccgttatgaagacgcgcccgcgcaggttgcccagaaggtaatcgagcaggcaaaggcgcagctggaggagtaatcacatagaacgaaaaaggggagcgcgaaggcgctcccctttttctataaaaatgttttatgcggcgtacaagcctgtttacaagcttttaccggaaactgacacggcgcctgtaagaaatttacacggccctgctataatttgcgcgtaatatcgttgcgggtattttttacacgtcagcaaacgggaatattatctcacgtaaaaagccgccctgctttataacagggcggctttacccgcgaatatacacaaagcggtatatataattacggctccacaatattgaagaagaactcaaaatcgactatattggcgcaaagcttatcaagtacggccttatcgccctcaatttttatcaatttcttttgctgcccggcgtctttgctcaatattgcgaacaggccggcctttggcatggtaagggttgcgtccgcgccgtccttctgtacgcctgtctggtacagcagcacgccgctgtgtacggtcagcaggtaattttccccggtgtcggttatcttcaagttgatttttaagtttaaatcctgcgccgcgttggaatcggtacggattcccaaataatccagcatcatttccggcgtcatgctccgctgtgtatctgcgctgccgttcgcgcggtatttgtcgtccgaaacggtgccttcccgcagctccttcgcgcccgacaggtaagcgttgcgccatggccccgattccgcctggtatccaagctgctcgagcgcgtccgcgcagagatagcgcgcctctttattttcggggtcggcgtataccagcacgtttgtaatttccgctacccactggtactctcccttatcgaaatcttcctttgcttttttgagaaccgcgccggtgtctcccaggtattccacgtatttttttgcgctctcgcttgggtcgagtgccccaagatgcacagggtttgcgtcgtaccagcccataaatctttggtatacggctttggcgttatgcgcgaccgtcccgtaatactgccttgtataccagttcttttccagctcggcgggtagctttattttgttcgcaatttcgttttccgtcagcccctggttgagatacatcagcgtctggtcgtttataaacttatagaccgcggcggtatccaccatatatttcctgatttttgcgttttcccagtgcggccagttgtgcgactggaatacggtttccaccttcgtcccgtatcgggaaaccgcctccatgatatactctgcccacgcgttgccgtcgcgtacctgcgcgccgcgcagcgtgtagaggttatgcagcgtgcccgtacagttctcggcaagccacagcgcgtttttctgcgggaaccacgtgttcatttcagccggggcttccgtaccgggcgtcatctggaattccattgcgatgccgtcgaccgtccttttttcacctgtttcctttatgatgtcgtttggtgttatgtaagtaatggttccctttgactgccccatgccaatgcccattgcaagggttccctgcggggagctttggagcagcgtcccatattggtaatttgccctgcgccccattgcgttgccggcataaacgttttcgctgatggcatgctcctcgaagccctcgggtacaatgatgggtattttcctgtccgttacctcttcctcagacacaatccccttgatgccgccgtaatggtcgacatgaggatggctgatgacgatgcctgtcacaggccgtttgcccagatgctcctccacaagctgcatggccgccttgctgcactccatgctcatcagcgggtcaaatacaatccagccggttttgccttctaccagcgtcatgtttgacatatcatacccgcgcacctggtaaataccgtcagatacctcaaacaggccatagatatggttgagctgggtatcgcgccacaggctcggattgacggtcgccggagcctgcgcattgttttcaacaaagctgtaagccttctggctccaaatgacttttccgttttcatccttgagctcaagcgcttccggcgccgcaatcaggcccttctgtgcgcaggcaaactcatccttgtcgccaaaatcgagcgcggtatatacggcttcgttgttttcctttgtaatttgtgtcgcttccttttgttcgggggtcaggggttcgtccgtgccgctttccccgcatgagacaagctgcaggcagaagagtatgcacagcagcatacaaagggcggcgcagatggttcgtttcatagaaattcctcctttagaatcggtgattgtttcccaattggggttccttttatttactgtcaaatatatcataccaaggaaaagaaggtccagtcaaatcaattgtttatttatttgtggcatattggaatttatgtttgtttttagccggaagaagacgcataaaaacgctgttatatagcgcaaaaatcaactgctaggaaacttttctttccgcaataggattttctgtttacccggtgtgttttttgctgattcatcttgtgtttctatattccttcgggtaaaatgggggatggatatggggaagcgccctatgtcacttttactgaaggagtacatatatgctgaaaatacaacatctgacgaaaacctacggggataaaaaagcggtggacgacctgagcctggaaatcaggcccggcgagatttacggctttatcggccacaatggcgccggaaagaccacaaccatcaaggcctgctgcggcctgctgcagtttgacagcggcgaaatcacggtagacggcgtttctgttaaggaaaatccgctcgaatgtaaaaaacggcttgcctatataccggataatcccgacctttacgattttatgccggctattaagtatttgaattttgttgccgatatttacggcgtttcaaaggaagaccgcgcgcagcgtattaaaaagtatgcggatatgtttgaaattacagataaccttgcccagccaatcaactccttttcccacggtatgaagcagaagctcgccgtcacctcggctttgattcacgacccgaagctgatgctgctcgacgagccgtttgtcgggcttgacccgatggcttcgcacctgcttaaagagcagatgcgcgccctgtgtgacaggggcggcgcaatcttcttctccacccacgttcttgaggtagcggaaaagctctgcgacaagattgcgataatcaagggcgggaggcttattgtatccggccctacagacgaggtgcgcggcaatacgtccctggaggaagtattcctggaactggaggagaaccatgggtaaaacagtctggtttttgatgaaaaaccgtttgtacacgctttttatgtcatcttttttcaagaaatcagcaaaaaccggcaagccgcagggcgcggggaaaatggtatcgtttattgctttgggtgtattccttgcggcctgctttatgtttgcaatgggttcaatgttcctgcttgtcgcgtacggcctggtcaaaaacaatatgtcctggatgtatttctctttgaccgccattgcggctgtcgcgttttcgctgttcggcagcgtgttcgcggcgcagtcatacgtctttgacgcaaaggataacgagctgctgctcagtatgcccattaagcccggcgccatccttttgagccgtattctgatgctgctggcgctgtcctatatttacgggcttatcgtttttattccggcgggggttgttttcgccttgttcgcgccgtttaccccgctgatgcttttgtattttatattgggcgctcttttgctgccgctactgtcggtcgcgctcacgtgtgtgcttggctggctgattgcgctgatttcttctaaaatgcgccggaaaaatattcttacaactattttcatgtttgtgtttatctttgcttatatcttctttttctcaaaccttatgggttatttgaatcttttgattacaaacaaagacgcggtggcacatgcgattcaaagctatatggctcctttttataacttcggcatgtcggtgggctccggcagcatcgtggatttccttctgctcgcgctgtggtgcctggcacctgtgacagtggtttacctcattttgtcaagaagctttatccgcattattacaacgaaaaagggccatgccaaggtcaggtataaggaaaaatcagtcaataggaaaagcccgcgccacgcgctgctcagaaaagagctgggatatttcctgagtttcccttcttatattttcaactgcggctttggtacggtgttttgtgcgattatgggtgtcgccctggcttttatcgcgcccaatatgatagccgcgcttgaccaggagctgcccggcttttcgtctttggcgccgcttgccgtcacggcggcaatttgcctgctctcctcgttcaacgacgtgtcagcgccttctatctccctggaggggaaaacactttggattatgaagtctatgccgcttaaggcaagcgacgtgttctttgcaaaatccatgagcaacctggcggtaagcctgcccggtattctcatcgcggcggtcatcagctggtttgtcttgccggtcggtatcgtggactgcgtgctgatgctcgtgctccccgtgctcgtctgtacgtttaccggaatgcttggcctcggcgtcaatttgctttgcccgcgcttcgactgggtaaacgaaacgtcggtcattaagcagagcatggcggtttttattaccgtgatggtcagcatggtgctgaccgcgctgccgtttggcattgcggtgccgcttgcgggcttcagcccaattcccggctgggcactgatgcttctgtgtgttctttacttcggcatacttaacgcgttgtgctttgcgttcctgcgcacaaagggaaaacgcatttacgaggagttcagcgtataaccgttcataggccagcggtcccgcccggcagtggcggggccgctctttgtcaaacaagttggagagattttttattgcctgtatagctatttaagccgtcataatgcggcatagcgtgtaacagcattgtttgtaaagttgggcaccacgaaatacaaaatcagcaagcccttgtccagcctgctggtgtgcatagtataccgcactttccctgaaaccgtggggcctgtatgatttatcctgaacccctgaaaacgggcttctatcgttccgtatgaccgccccggcgtgagactggccccgtctcacaccagggctatttttatgtgcggtgggaatcccaatcccatacaaaacaatcgcggcaagcagggcaagtgcatatgcacttgccctgcttgccgcgattgaactgccgatattaacaactttgccttaatccaaaaaggcgaattacgtaagcaattataatgtctgcaaaatatcataactcattgtccgaaagacttgacagtatttttgaaacccttttaaaccaatgatataaatattaggcatataggacaacctttttcttgagtatgcaatgcgctccaatccattgtcgattgccgtatgattacttaacgctacacaaacattttggtgaattgcggtatcaataaaataattcaatgatttaatgtattgttctattccggattttgtccaaggtggcgtagttcctccccacaaagcagccttatggatttccccattttccgttactggaaatatatagctcaagcatccgggcgtatgcccgggagtgctgtagacatatattaccttatctcctaattctatggtatctccatcattcacataatgggtaatgttgtagtctttccacgtttccggtctatctgatttaactggatgttcttcccaaaaaatatcatcttcccgggaaagatatgtgtcaacacaatattgttcaacaaaccacctaccacatcccacgtgatcaacatgaccatgcgttaaaagcagttttttaattgtgtctggattccagcctatctcgattattgcatcaataatagcattaaatgcctcttttgcaggccatatggcatcaataacaatcaagccgccgctcgtcttcagtacaaaacaatttgtctctttttgggcaacaatcagcaagtcgtcaaaaattagtgcatgggtaaaaaacgacatatcctccattgcttttattgtttcacctgtaatgacgggcttatttaatctattcatttttgcgcaactcctctgtacaattttaatgttgtttttgcacagagggaaaacgattcttgggtggcatatcatcacttcctagctaaaatactgttccgcttatttgcgttatgtcgttcgccttatccgctaaaggcgaccaaacctaatttagttttttctattctaatatttacatgcggaaatgtcaaacaactcatttcgtgtcataatttcatgttactgtccataactctttttgttcgtttgggcgccattcgggcaccattttccactttaacagatagattcattctataagaaacccagtaactatgcgcttttcagcttatagcgaagccacaaccagctggaaaaataactatttttcatgatgtatcgccttacggcgaaatgatggattgcgttgcaaaatgatgtgcctacgcttcgctgcggcatgatgtgatgttagcccctgtgtcccgcgggacacatcattgccgaaggcagcatcatcgcacgaagcggcatcattgcccgaacgggcaaacatcattctaacaaagccctttttgctttcatggcaatccctttgtttttaaaccgcccgccttgtttttttttcgccgccatagtataatttattttatctaagcttttccaggcaggcttaataaggaagggcctgcagacagaacgggtcggcggttcccgccggaggaggtttctatgcatttcaggttaaaacgcgcggtatcctgcgcagtgatttttctgcttttgatatccgctttccatattaccgtttcggcggcggacaagtcctaccagattgaggagcttggcatgagcataaccctgccggataacatttcggccgtcacgcgccagacaaaggagaacgatcccgcgtttgcggcgcttggctatacctatgagcaggcgcagaaggtcatgaaggaatccgatatttacctcaagggtgttccgaaggacgcgtcctacgaggtggaagtttatatggtgaaaaacgagcacagcggcagcgtatacaatttaaagctgctcagcgaaaatcagctcgctgccgtcaaaaaggaattggaggcggacgaaaactgtaccggctgtacattgacgcagacaggcgatacggttgttttcaatatggaaacgaagtatgaaatccccgcgcaggacggcgcaaagccagttgctgtttacggcgtcatgagctatacggtcgtaaatggaatgcaggtgagcttttcacttagaagcatgggcagcccggtatctgttgcggagcacggtatattcagtgcggcggcctccagtataaaatttgacgaaatactggcaaagcctcttcaggtcgatatgctgggcatcatcctgacgtcggttatcgcaattctggtaatcgtcgtttttgccgctgttatcatcatcctgcgcggcaggaagaaaagaaggaagggcctgctcgatgcggaaagaaggctttccagccagaacggcccatcgccgctgcgcgggttttacgatgagctcgaacaggacggcctgctcgaggtaccgggtaaaaagggcaaaaagcccgcgcaggctgccggtgacgctgtaaaccagcccgtgcgcattactgtagaggttcccgtcaccacgccgtcggacgacaatatccgcgcggtcgatgagacgaaggacaagaagaaagccttacgcgaggacgaagcggacagtgtggagcttaccagaagcaataacgaggattacgacgaggcggccgcggaggaaaatacaatacgcagcagcaagctgcggatttttgtcggcggcgccggttccaaaataaagaactcggtttcctctatcggcgatatcctcaagaacaggcaggaagcgggggaagaggaagcgccgaaggagcagaggctcgacgattacgacccgctttccgacgtttcctacgagggcatacctgccgggcttgaaaagcagccgcttcccgacggctttgaaaaggagattttacaggcgcgcacggagcccgttgaaaatgtacagcgggagactgatatggaatcctcagggaatactgaaaaagagaaggatttaccccaaagtgaaacaaatccgccgaaaaaggaagggcgcgcggcaaatcccaacgcgcgtgaaagcttccgccaggtagcgggcagcgataaagcgctcggcgcgtttgaaagcgacagctattgggataaataccgttaaagagcggaaggggaaaagcaatgcacacctgtttactgaaaaacgcccgtgtaatcgacccgtcgcaggggattgaccgtacggccgatatcctggtggaagctggaaaaattaaaagaatcggggaaatcggaacggaagcggagcgtgtgattgacgcatccggtttgattgccgcgccgggccttgtcgatatgcacgtccatctgcgggacccgggccagacacagaaggaggacatcctttcgggctgctcggcggcggcggcgggcggcgtaacgagcctgcttgccatgccgaacaccagccctactgtggacagcggggaaacggtgcgctatatcctacaaaaggctcaggctgcgaaagcgcgcgtctatgtggcggcaagtattacaaagggcctgaaaagcgaggagctgtgtaatttacaggagcttcgtgacgcgggcgcaattgccctgacggatgacggcaggccggtggtcaacacaggcttcatggcgcgggcgatggccctggcgccggcgctttctatgaaggtcgttgcccactgcgaggatttataccttgccgacggcggcattatcaacgaaggagaggtatcgcaaaagctcggcgtaaaggggattcccgccgccgctgaagacgcgggcaccgcgcgggagattgcgcttgcggcggcttacggcgtacccatccatatctgccatgtcagcacggcggcgtctgtagcccttatccgggacgcaaaacgccggggcgtcatggtgacggcggaaaccgcgccgcactattttacgtttacgcaggatgcgctcctgaaaagggacgccgattaccgtatgaacccgccgcttcggacacagcgcgacagggaagccgttatagagggccttctcgacggtacgctcgacgcgattgcgaccgaccacgcgccgcacacgccgcgcgacaaggcggattttgaaaaggcgcccaacggctcgattggtatggaaacatccttaagcgcggcgcttacgttcctggtgcataccggaaggcttaagctcggtgagataatcgataaaatgtcctgtgcgcccgcgcgaatcctggggattgacgcgggaacgctcaaaaccggagcgcccgccgatatcgtgttattcgacccggaagagcgctatacggttgatattgcaaagctccacgggaaatcaaaaaacaccccgtttaaagggatggagctaaagggcaaggtaaagacaaccatatgcggcggcatcgtcgtatatgaggataaataaagcaggtaaaaacaagaaaacggaggaataacctatgtctcttgacaggctgattgaagcaattgcagaaaaacaaaatcccacggtggcagggctcgacccgaagctcgattatatccccgcgtatctcagggaagaagcgtacggggagtttggaaaaacgcccgaaggcgcggcgcaagcgatttggctttacaacaaagggctgatagacgcgctctgcggcgtcgtccccgcggtaaagccgcaggcggcgtactatgagatgtacggctggcagggaatgcgggcgcttgcaaagacgattgcatatgcccaggaaaagggcatgtttgtcataacggacggcaagcgcaacgatattggcagtacgatggaggcatacgccgcggcgcatctcgggcagacggaaatcgaggggagcgctgtaagcgcgtttggctccgacgccctgacggtcaacggctatctcggttcggacggcatcacgccgcttctcgacacctgcggcaaatttgacacaggcatgttcgtgctcgtcaaaacatcaaacccaagctctggcgaattgcagaaccttgtgctggagggcggggaaagcatttacctccacatgggcaaaatgtgtgaaaaatggggacaaagcctgcccgggaaatacgggtacagcggcgtgggcgccgttgtaggcgccacctacccacagcagctcaaggagcttcgcgcggagcttccccatacgttcttccttgttccgggctacggcgcgcagggcggcaaggcagacgacattgccggagctttcgataaaaagggcttaggcgcggtcgtcaactcatcgcggggtatcatgtgcgcgtggaaaaaagaaaactgcgcgcctgaggaatacgcgcaggctgcgctgcgtgaagcggaaaaaatgaaaaagctgctcaccggtgttacaggtacaattacattataatgcttataaatccccaaacggttatttccgtttggggatttttgccgcataaagcaatgaaacccggcgtatacataaattggaggattctccggaaaaatgttgggtgataataaagttaggcgcatcttaccacgtttttgaacatatttttttgctgaaatttattgggattggaaatttctgttacaatagattcataacgaatacagaaagaaggtggacggtatcagcaagcgttttaaggaaaaggttatggaatccctgacctcggtgcttcccatcacgctgattgttttgcttttgagcgttacccttacgccaatgccgacgggaacgctgctgatgtttctcgttggggcggtactgctgattttaggcatgggctttttctcacttggcgccgatatggccatgatgccgatgggcgaggcgctgagcgcgtccctgacgaaaacacggcgaatctcgcttgtggtgccggtattctttgttctgggcgttatggtaacggtagccgagcccgatttgcaggtgcttgcaaaccaggtgccggctatcccgaaccccgtgctgatttggacggtcgcggcaggcgtgggcctgttcctcgttatggctgtgctgcgcaccctgtttaaaatcaggctttccgtattgcttttgattttctacctgattgtattttgcgtcgcggcgtttaccccgccggatttcctggcggtcgcgttcgattccggcggcgttacaaccgggccgattacggtaccgtttatcatggcgcttggcatcggcatggcgtccgttcgcgccgaccgttcctcacaggaggacagcttcggcatggtcgcgcttgcaagcatcgggccggtgctcgcggtgctgctgctcggcatcggctatcatccggaatccgccgagtatacacgcacgcaggtgccggacgtcgcgaccagcaaagaggttgcggccgcttttttagacggcttcccgcattatatcagcgaggtgctctttgccgtcgtcccaattgcggcggtgttcctgctgtttcaaattatttcgcgcgcgttcggccgccggcagctgattaaggtgggcgtgggcttcggctatacgctcattgggctgatactgtttttaaccggcgtcaacgtcgggttcatgccggtaggccatctgataggcggtgcagtcgcgggctcgtcctattcctgggcgctgctgattatcggggcggtgatgggctggtttatcgtcgctgccgaacccgccgtgcacgtgctaacgcgccaggtagaggagataacgagcggcgctatcagcggaaaagcaatgcggcggagcctttccatcggtgtttctgtttcgattgcgctctccatggcgcgcatcctttggggaatttccctgttttggtttatcattcccgggtatgcgctcgccctgctcctctcgtttatcgttccgcgcatcttcacgggcatcgcgttcgactcaggcggtgttgcgagcggcccgatgacggcaaccttcctgctcccgtttggaatgggcgcgtgcgaggcgcttggcggcaatattttgaccgacgcgtttggaattgtcgcgctggtcgcaatgacgccgctcgtcacaatccagctgctggggctttactataagctgaaaacgcggggtgagccgcaggccgcggccgggctgctgccgcagacggtatatgacgacattatcgaatacgacagggaggcggtataatggaacaaaaggaaagaatctccgcggtcaagctgcttattacgatagtagacaggggaaagggcaaaaaagttgcctctgtctttggaaaatacggccttcattttcatatggtttcctttggaaagggtaccgcttcgagtgaaacgcttgattatctcgggcttggcgaaacggataaatcgctcgtcatgagcctgtcgcccgaagaaaaggttccggacgtgcgcgccgccctcgtagaggatatgaagctatacagcccgggcaagggtattttatttggaattcccatatcgagcatcagcggacgtatggcgcgccagctctcggcgccggattatcaatcggaaaaggaagtggctcagatggaaatgacgcagtacagcctggtgcttgccatggtgaaccaggggcatgacgaggaggtaatggatgcggcgcgcggcgcgggcgcggcaggaggcacgcttttacactgccggcgggtcggcggggaagaggcgacggaattttttggtatctccatcagtcaggagcgcgcgcttatcgctattttgattaagagcgagatacgcgcggacgtgatgcgcgcgattttagacaaagcgggccttggaacgccggcgcagggtatcgtgctctccttgccggttgacagcatagacgggctgcatctgaaatgatttatacaaattagcagggggcgtccggcatatgccggacgccccctgctttgtactgcatctatcaaattgccatcgaaatacactaaggcgcaacaattgtttgtacttcgtagcgtgcgctgataaacgcccaattctgcgcaaacgggcgcataatattccagtagccgccgccaatcagcccgtattcgtccattaagccgaatttcgcctgcatgctgcgcacatcctcaaaccagacgacgtgcgaaaggccgtttgtatccctgtattcaaaaaacggcgactgggccgtctggtcaaactggatttccgcgcggctgcgcgcggcgatttcaaccgcgtagtcgttgccgattgtcgtcgcgcgggtaacgccctgtataaaaggcagaatccagtcgtatccataattcggcaagcccatcataattttctgccgggggattaccgttacggcgtaatcgaccacctcgcgcaccttgttgagcggggcgaccgccatgggagggccgtaggtatagccccattcataggtcataagcaggacaaaatcagaaatttccccaatcgccttgtaatcgtgtgattcgtaaagcaggcccggctggtcgccggatgtctttggagccaaatctgtattgacaaaatagccgttcgcatgcaggcggttcgtcacattttgcaggaagcgggtaaacgcctcccggtcgtcgggattgatatattcaaaatcgacgtcgagtcccaaatatcctttctgccgcatgacctcgagcacattgccgattacgatatcctgaagcgcggtatcctggaacagcctgcttgcacgctcgctgctgaaggttccgccctcagtgatagaggaaagcagcatgatgggagctgtttgatagcggtaggcaaggcttatcatttcctggtcgtcggcgggcggaatcagctcaccggttaacgtaaagccgtagccaaaaatcgtaaggctcgtgagaaacgggagcgtacgctccagaagcgcccgttgtatgtacggataagcatacccgttgaggcgcacctggcgaattttcggtccctggtagcgtacgactatcgtttgccccgcgctcaagaagggcgcgccgattaaccctgggttgttttgcagcagcacacgctcagtcgtaccgaaataacctgcgaccgcgcttagcgtatcgcccgggaccgatgtgtataccacgtccggtatcaggatgataagcgcctgcccaaccacaagattgtctggatcgacaatatggttgctttctatgattctctgtgcggaaaccccatatcgagccgcaatgcccagcacggtgtctccgggctgtaccacatatatttccaaaaaccgcaccgtcctttatatgattcttttcctattttatgtaatgaacgggcgttttgtgttattgtgtgaacaaaaaggaaccgccgcggcggttcctttttaaatcatatcctattgatggctgcttacagttcttcctgggaggagggggccgaagaaaactcccttgaatagagctctgtcccgtcggcgtccatgtatttgactaccagaacaggattatcaacctccacaacgtttttgagcgtttccgcaatcagttcaaaggtgggggccatctggtcggcaatcccatccattgcatccgccataccggacgtatttaccccttcgggatacgtatacgtataaatcagcttgttgccctcgccggtcatggtaaaggtgaggccgctgtccttgtacaagtccgccatagtctccatttgcttttgtacttctggagattccgcatactccttcatggtcgcaaactttgcgccggctggagtggcttcgcccgaagcggcagagctgctgccggctttgctggtagcgggctcagtctggcttgaaactgcactgctgggagtggaagaggtgtccttcggcgaatccgcacaggataccatgcccagtgcagcggaaagagccagtgccgccacaattatgccctttgtaatctttttcaatttgtcataccccttttctgttatgatatgtgatattccactacaatattatatctaacagaaacccaacggtcaatgtttgttttattcaccaagtggaagcaaataaagggcgtaccttgacatgtaccgtaaggcgcatatccgaaaaggtaacgccgccaatgcggcacggcctgttctcatctcaccttcccaaaagccacaaaacaaaaccaccgcttaacagcggtggttttgttttggtgggagaaggtggattcgaaccaccgaagtcactgacaacagatttacagtctgccccctttggccactcgggaattctcccatataaagcctgaattcaggcgtttttaacaaccgatagagaaaatcgtggagctagcggacggacaaaaacgcagctttcgcctgcgcttttcagctcagccacccaaaggctgcgcctttcagtaccggcctcgccgcttttcgctaaaaatgccgcccagcggcattttctgacgctcaaaccctcttaggcttcaagcccgtccttatacgctttgtgcagaaaatcgtggagctggtggacggacttgaacccccgacctgctgattacaaatcagctgctctaccaactgagctacaccagcatgtttgcacttgacgctaaaataatataccacttcacagatatcttgtcaacagttttttataaagtttttgacgaaaaaaatatgcaggtcctctgtcttccaaatctcttggttagaaaagcggagaatttaaataattccgattttattgtttcctgctatttcagggaatattgagattttattttataacctaaaatattcctgccaaaagcaaaaaagaaacgggcgctttttaggcgcccgctccgcttagaaagaattgctaattagcaaccacagccacagccattgttgttgcagccgcaaccgcagccatcatcgttgttgccacagcagcaaacgaggatgataataagaagaattacccaagtgcagctattgccgccgccgaataaaccattacacatagcgttgttttcctcctttcaagcgttacattatagtatattgctgcttgcgttttttggttacaaaaaaacgggcgggtttttctaattctttttctgcggcttgtacataaaaaagccgcagcggctatctggcttcattttcctggcaattgaaaaaaaggctggaatctggtatcataacatcaacgacccaaaatacaggtaaagaaaagggagaggaaccatgaaaaaactttggtcaatcgtgctttgccttgcgctaacctgcatgccgttcggtatcagcgcggcagagcctttggatgacgttgtcataaccatcgcgcataccaacgatatccacgcgcgcaacagctacgacgaatataacaggacgataggctttccaaagatgaaaacgatactaaacaatatcggtgcggaccttgttttggacgcgggcgatttgttccatgggcaggcattcgctaccgttgaaaacggcgagagcattgcaaggcttgtaaacgccgtcggttacgacgcgatgacgcccggcaaccacgattggaactatgggcaggagcagcttttaaagcttgagcagattgccggtattcctgtaatggctggcaacgtggtaaaaaacagcaatgaaaaattcttcaatacggactatatggttaaggacgtcgacggtgtgaaggtcggtgtgttcggcgtaatcgacccgatggtttacagctctaccaaccctgcgctgatgcaggggattaaatataccgatatatacgaatatgctaacaggatagtagacgaactgaaaccgcagtgcgacgtgattgtctgcctgtcgcatatggtcgaccatgaggcgtttgcaaaacaggtccaggacgttgatttgctaatctgcggccacctgcatgtggagatgagcgagcaggtcggggataccctgattgttgaaacaggggaatacatgcacaacattggccaggtgcagcttacctattcaaaaagcggcaaaaaactcgtttctaaagaggcgggattgatttcctttgaggacgcgcagcaaacggcggaggatccggaaattaaggcgcttgtcgatgagataaacggcgggcaggcagaaatattgaacgaggtggtcggcagtacgcccgtcaatctcgacggtgagaaataccacgtccgcgcttttgaaacaaatctcgggcgtgtcgtgacagacacctacctctatgaaacgggagcggacatcgcgtttgaaaacggcggcggcatccgttcttccatcgaggcgggagacatcaccaaacgggacgtcgtcaatgtcgcgccgtttggcaacatcattgttacaaagcaggtaagcggacaggatatcctggatattctcgaaagctccatcgacctgggtatgcgcaacgcgcttgcgttttcaggggaatcgaaggactggcctgaaaacgacggcagctacctccaggtgggcggcctgtgcgcacagtacgacacggaaaagccgctggggagcagggtacagggcgtaacggtaggcgggaaaccgcttgacgttgaaaagcggtataccgtagccgggaataactttattatgaacagcaccgattacccggcgcttgcaaacgcgaaggtacagagcgaatacacaacctgcgacgacgctcttacgaaatttatcgcggcggtcggtgtggaaggctccatcgacaatgcccggcttgtggatattacaggccggcaggagccgactgagcccactcagccggagacagcgccgccgacacaggcgcctacagaagcgcccaccctgtccccgacgcagggcgcttcctctttgccgtcgccctccagcccagagcaggggaagggcgacgcacagacgggcgacaatactccctggattatggtagccgtgctgcttgttttgagccttgccgttattattgtcctcgtgattaaaccgaagaataaaaaatagaaaatatagaatccttttttcagccggaaaagcccgtgaaatcagtatttctgctgtgtgcaatctaattttgcaaagggtaaaatggtgcccgaatgatatccaggcgaacaaacagcgttatgtacagcagcataaagttggtttttgtgtttgttcgcccaggcagattactcggcaaatcgggatttataggtgaatttatgaaaacaaatttaattattgtggaaggacttccgggtagtggaaagagtacaacagcggcaatgattgctgaggaactacagaaaaagggcaaaaaggccgtttgtgccgatgaaggcgtacaggaacatccggcagattacgcagactatgattttccggattttggaacagagcgaaagaaaatccttaataagtggcgctcctttgcagagggctttgacaaagatacgatatatattttcaactgtatttacatacagaatccgatgtgtgaaacgatgatgcggtttggcatggatgaagaagcttcaaagggctacattgcagagataacggaagtaattaaaccgttgaatccggttattgtttacatagatggattagacgtcaaagctgcaattgacagtgtgcttgatgaacgtggaactgattggctggatgctgtaattgattatcacgtatcgcaaggatatggaaaagaaaataacctgtctggttatgatgggtacatcaagtgtctggaagaaagaagaatccgggaacttcgtatattgcaagggcttgatattgactactatacaataagccaggatatgcgtgctgaagagcttgcaggtttatttttttccatcggttggaatgaaccttcgatggaacagatgcggcttgccatagaaaacagtacaaaatcttttatagtccgacataaaggggaagccgttgcggccattaactggcttggagactatggtatgcactggtttatgaaagagtttattgtgcataaagaatttcaagggcagatgatagggacgtttctgtaccgtttttcggaaaactttattaaaagtacaatgcagatgggctggaaggtgtgtattgatttaaaatcatccaaaggaaaagagaagttttatcaaaaacttggattccagacaatgacggagaaggatacaggcagcggtatggagaaaatgattgagcggtaattggaaaagaacgcgttgtggtgaccaactttacaaaacctagctgttactgattatgccgctctgttttctggatttgagaaaacgtctattttatacaggcctgcgggactttttatgagaagtcccaccgccttatgccgggttattctggtatcgggcaataaaaaacagacaaaacaaaacccgttccggaaggaacgggtttttcattgaagcactgcttattcttccatctgcttgccgaggaacgcggccgccgactgcgtgagcttgatttccgcctcgctcgggacgctcttgttgtcgccgcagagcatgataacactgccggtgacgtcgcccgcggcgataattgggtacataattgccgcgccgcgctccatgccctctaccggctggatgtcgcccatatcgcccgcgtgtgccgcaaagctgcggcgcgtctccatgaattcctcgataactggcgtgatgcgccgctcaaggtattcccttttggacacgcccgccgccgccacgatgtggtcgcggtcgctgataagggtaggcaggcccgaaatttttgcgagaacctccgcgtactgagcggcaaagttcgataattcgccgacgggcgaatattttttgaaaatgacctctccgtcactgtctgtataaatctcaagcgggtccccttcgcggatacgcagagtacgcctgatttcctttgggatgacgacgcgtcccaggtcgtcgattcttctaactattcctgtcgctttcatattaaagtaaacctccaaaattatatggataataatcacggaaccatccgttgtaaacctgatcgtcacgatacttattatatgtatccttggaattggtatacagaaattttggtaaggttttttttgacaattaaaagcgccccgaccgcccgagtcatcggctgaaatcgaagaaaaacaaagagcggggagattatccccccgcccgtttaataactgcgccgcctgcgttcctggtaattcggctttgaaccctgcttctgctgcgggcgccttcccgccggcctgcggccgtctccgtaggcgcttaccgttacgcttttgccgcatacggtaaggtcgcacagctctcccagtacctggtcgagcgacgattttggcacgccgacgacgctgtattcgtcgtatatatcaattttgccaaggtccctgccgtttaaactgcagctttcagaaattgccgcgacaatatgctttggcgcgatatgctgcctttttccaatgctgattttaatttttccgtagccgccggacatatccggggcgttcgcctgcgctgggcgtttcctctggacagccttgatttccacctcttttttcgggattccgaaatagagctggagcgccgccgccgcaataagctgctcgctgttgccgcgttttacaagctcctcggtaagctccatatagtcaaaccgtccctgcgcgatggtttcctcgattttatgcatttgtgttttcatgcgcatttcacgcattgcctgcgcgttcgggaagtcgcgccgctcaatcctcacctttaaaagccttgcaagctgtaaaagcgtctgtacctggcggccgccgcagcacatggtgatggcgctgcccgtttttccggcgcgccccgtcctgccgattcggtgcacataatattccgtgttttgcgggatgtcgtaattgatgacgaaatcgacgtcgtttacatcgatgccccttgccgcgacgtcggttgcaatcagcgccgtaatccgtccgcttttaaacgcgtccatgacctgtgtgcgctgcgactgcttcatatctccgtggattccctgtacgctgaacccggactggcgcagcttaattgcaatttcatccaccatttttttggtgtttgcaaaaataatcgtccgctttgaatcatggtactgcaaaagcgccgcgagcgcgtccattttctgccctgttggaatttcgtagaacgactgctctatattttcgaccgttgcctgcttgacgttgacggctaccagctgcgggtcctgctggaaatccttcgtcagcgccataatggcgggcggcatggtcgcggagaacaggatggtctgccgttcttcaggcgcgtcctgcaaaatcgtctcgatgtcctccctaaagcccatgctcagcatttcatctgcctcgtcgagcacaatcattttcaggtcgtgcaggcgcatcgtcctgcgccgcaggtggtccatgatgcgcccgggcgtcccaatgacgatgttggcgcgcctgagcttttgaatctgcgcttccatcggcgcgccgccgtatatttccgcagtgctcacgccaattttatatttcgcaagctttttgatttcgattccggcctgcagcgcaagctcccttgtggggcatacgattaaaacctgtacgctgcgcgactggagcatcgggtcgattatttcaatcgccgggatgccgaacgcaagcgttttgcccgtgcccgtctgggaacggccgataacgtcacggccttcccggattaatgggatggcattggcctgtatttccgtcgccgtttcaaatcctagctcgtcaatagcccgctggatttcacggggcaggtttagttccttaaaagatgtttcgttcatgtagttcctcttttcattatagctgctgtcatttatgattccctgaaataacaaaaaaaataacgaggcgatgatgcacctcgtcaaacagggaaatgatcctattcagcataccatactttacctcttttgtaaatgataatcattccaattctacatattgttggcacgccggtgaaaaataacagaaagcattgcggccttcaaatggggaattctgtcaaaaatgcgtttttcagattgaaagattgggcattttagtgtatgatatattttatctaggagcatgagcttgaggtgattctcattggcgcgtaaaaaacgcatgccggaccatgccgctgcaaaaccaaaggaaagcattccgccgcaaatccccgggaaaacgccggagcaggcggaaaaaaagggaacctgcggctacagtgagcggtatggcggcggctacagcacttcttccaatataacgccggaaatcagggacgctgcaaaccatatgggcagcggcctttatagccttgcccagcagatggggctcaagcttacgcagaacgaggggtattttaatttcggcgcaggcatacaggtacacggaaaggactatattttaaatataccgaccgcgtttgcttaccggacggatttccacagcagggagctcatcgcgtattccgctgattgtgaagaggattaccgccagtcgcccgttattatagagctggagcgcgtaaagctgccggccgttttaacgccggaagaattatccctgcgccaaaaggcgggggccgaaatgactggccgcgattttaaagagctgaaggtaaacggggctgccgccgtcatgattagcgagaaccgcgagcatttccctaaaatttaccggattgcggttttaaaaaaaagcgggaacgagctctttcatttgattattacattccgcccggaaattgaaaatacggacgaaatcactaagcggttgtatttcagcttttacctgctggatgaatgaaaatagataacggagcgttttcatggaacttgaaattctaaattttatacagcagcatctgcgtaacccggtttttgacgtgcttatgccttttttaagcttaatcggcgaagcgggcatcgtttggattaccatctgcgcggtactgctcttcttcaaaaaatacaggccgtacgccgtgatggcgctgctcgccatgctgcttgtctatctggcgggggaggtgctgctcaaaaacatcatcgaacggccgcgcccgttccttgtcaacacgggcgttacgatgattgtcgcaaagcccgacagcttttcgttcccatcgggccattcttcttcgtcgttcgcggcggcgtgcatcctattgcgttgcgggaacaaatggctcgggattggtgcggttgtgcttgcggcgtctatcgcgttttccaggatgtacgtttatgtgcattatccgtctgacgtaatcgcgggcgtgctgttcggcatattcagcgcatggcttgtttattttatatataaaaagttcgttttaaaagaaaaaaggggcggtctgaaatgaaaaaatacgcgtatctcggcagcggcacgggggaaaagttttgtatcaagggaatcgacgtatataagtacaggtggctcatggagggcgactgcgtgattgtgaccgaccccaaaaccaaaaagccgcgcagcttttccgtttataaaatacgtgtgggggacagcgatatgcggtttatcgcgggagaattaagcgacggcagcaccggcttttatgaatacgagccataaagcgcttttctgtaacacacgccgcaaggcgttcgatagataaggatgggaaatttatgtttgaacaaatcaaagcggaaaatttactcgacattggcaaaaccattgcaaagccactgtttgaaaatgcggcctacccgtgggaagcgctcgacgggctgaaggagtttattatggagctcggccctgcgctttcaaaggaagaatacgaacagaaagggaaaaacatctgggttgcgaaaagcgcgagggttgcgccgagcgcaagccttacgggtccgcttatcatctgcccggaagcggaaatccgccattgcgcgtttatccgcggggtcgtaatcgtcggcagcggcgcggtcgtcggcaattcgacggagctcaagggctccatcctgttcgacaaggtacaggcgccgcactataattatgtaggggattccattttgggctataaggcgcacatgggtgccggctccatcacctcaaacctaaagtctgacaaatcgcaggtcgtgataagcctgctcggggaaaagcttccgacaggcaggaaaaagctcggcgctatcctgggagacaacgttgaggtcgggtgcaacagcgttttgaatcccggaacaatcataggccgcagcagtaccatttacccgctttccatggtgcgcggcgtcgtagcgaaaaacagcatttataaaaaccagggcgagattgtagacaaacgctgaattaaagcgttaatatataatcccgcgccttgcagccatccctttgtcgtagggatggctgattttttgtcgtgttgcgcagccgcataaaaaaattgacatttagcgaattaacatggtaaagtataacagcttgagaaaatataacaatcataaaggagagtggattatgaaacaacaaaaaagaaaaatgcaggtgagcctgtccatattgcttgcggccgttatgctgattggcatgtgcgccgttttacctgtaaccgccgccggtgcgaaaacaagcggggattacgagtatgaaaatataaatgacggtacggtaaggattacaggctacaccggaacagacgatatcataaccatcccctctgaaatagacggtaaaaaagtttcacgcattgggataggagccttttggggctgcacgagcctgaccagtgtaaaaatccctgaaactgttacaggccttgaagtcagtgctttttcgggttgtacgagcctggccggcatagatattcccaatagtgttactagtattgaaatgaatgcctttgggaactgcacgagcctgaccagcataaaaattcccgaaagtgttgtaagcattgggtctgaagcctttcgggattgcaggaaattgaccggcataaaaatcccgaaaaaggttacaaaaattgcaagcgctgcctttgtgtcctgcgtaagcctgacagacgtagaaattccgcaaggggttacaagcatcggagaaagtgcttttttaaattgtagtaatttaacggaaatcaccattccgagcagcgttaccgagttaggcggacaggccttcaggaactgcacgcgcctgaccggcgtaaaaatccccgagggtgttacaagcatagaagaatgtacttttatttcctgcaagagcctgacaaacattgaaattccgcaaggggttacaagcattgggggtgttgcttttgaagattgcgcgagcctggccgaaataaaaatccccgatagcgttacaagcattggagtcggtgcttttttggattgtacgagcctggcagacatagatattcccgagggtgttaccagcattgaaaagaatacctttaagaattgcacgagcctgaccagcataaaaattcccgaaagtgttgtaagcattgggtctgaagcctttcagggctgcaggaaattgaccggcataaaaatccccgagggtgttacaagcatagaagaatgtacttttatatcttgcgtaagcctgacagacgtagaaattccgcaaggggttacaagcatcggagggagtgctttttacgattgcagtaatttaacgaaggtcacaatcccgcgcagtgtcgaaacaataggatatcatgcgttcgggtataaaaatatgattccaaatgatggtttccaatatggaaaaatagataactttacaatctgcggctataaaggcacgccggcgcaagcctatgcgaatgacaacgggtttttgtttatagcggaagttgttttgggcgatgcagaccttgacggagaaataaaggtggccgacgtcctgctcatgcaaaaggtgattgccaaaatcatacagccttcagaagaacaaatagaagcaggcgatatcgaccatgacgggaccattacggtaaaagatgttttgtcggtacagaaatatcttgcaaaggttataccgaatctttaaataaaaaaggcgccttaaaactcaatcccgcgccttgcagccatccctttgtcgtagggatggctgatttttttaatttctgaggcatagtcgcaaagcgctgtaaaatcatcgcttacgctgtggccggtcaaaatgatttccgtgtgcttcggcgcgttttttaaaaaggaaaacagcttttcgcttgaaagcatgccgcagtcgataagggaaaacgcctcgtcgagaacaaccatgtcgaaccggtcaaggctttcctttgaaacggcctttttaaataaaaggcgatattcctctgtaaagcgcttaagctcttccggcttcatctggaaggtaaacggaacgctttccgggcagggcgtaagcgttatgttttttatttcttttaaggcggcgcgttccccgcttattgagctcttcaggaattggacgaacagcacgcgcaggccggcgcccgccgcccggacggcaagcccgacggccgccgtcgtttttccttttccgtcgccgtaatataaatgaatcatgttacccgcttcctttcctatatattataagtatagcaaggccgctttttttgcgcaatgcctggaactgcttgaaaaacggttcaaaatcgcttattatgaaacaataaaagaaagcggaaggaaggtttttatatgcagaggggaaaaaccaaaacaaacaggcgcacactgtttgtcaggacggttgccattgtgtgcgccgctttgattgtcggctcaatcgtattatcggtcgttatgatgctccgctgatttgtccataaattcctgcgcgattctcttcatatcgtccgcgctgtggatttgcgcggcgttttgattgattgcttccttgacctcgtcaggcagggaaagaaaatagctgccaaggtctgtgtcgtgcgccgccatcatggacattcccagcggtgtgtttggatagagcatatccggcatattatcaccccgtaattagcttttccgcgcatgtgctgtttatgacggaaataaggaaaattcggagttttttccgcaaacctcttgcgcaacggctgaaaacagatataatgaatataatagccgctttatgcggcaaaaacgaaaacagccataatggaggagaaacaacatgaacaaggtaacaaaagcggcggcagtcgtgcttgcggccgtcatgctcgcgtttgcggcggcgtcctgttcggcaaatgtcccggcaaacacggtttttagccagaaggacctgcccggaaagaaaatcggcgtacagatgggcacaaccggcgacatttacgcatccgactatgaaaaagaaggttctacggtcgaacgctatacaaagggcctcgacgcggtccaggcgctcaaacagggtaaaatcgattgtgttattattgacgaggagcccgcaaaggtttttgtggagaaaaacacggaactgaaaatcctcgacgattcctttgataaagaggaatacgcgattgccctgaaaaaggacaatacagagcttaaagataaaatcaacaaagcgctttctgagctcaaggccgacggcaccatccagaagattatcgacaattacatcggcgacgacacaaagggctcctataagtacgcttctccggaaggcacaaagagggacaacggaaagctcgtcatggctacaaacgcgcagttcccgccgtatgagtacaccgaaggcagcgacatcgttggaatcgacgccgacatggcccaggcggttgccgacaagctcggcatggagctcaagattgaagacatgaagtttgacgcaatcatcaccgctgttactaccggcaaggccgatatcggcgtagcgggtatgactgttacggaagaccgcctgaagaacgtcgcgtttaccgatacatacgcgtccgcaaggcaggttattattgtcagaagcaaataaaatttaaaacattccggtgaggctgtcttaaaacggcagcctcaccgtttgttgggacggtggttctatgcagggcttttgggacagctttagccagaattttatacaggacgaccggtggacatggcttttaaagggtctcggcgtaacgcttgagattacgctgtttgccgttatcctcggtattgtactgggcttccttattgcgattgtgcggtctacgaccgacaagaccgtaaagggcaaaagcaaaaaggagcgtacattttccgaccgcgtgctgcttttcttcaactggctgtgcaacgtttacctgacggtcattcgcggcacgcctgtcgtcgttcagctgatgattatttattacgtgatatttcaggcgttcgatgtggacaaggttatcgtcgcggtgattgcgttcggcatcaattccggcgcgtacgtcgctgaaattgtccgctccggcattatgtcggttgacaaggggcagtttgaggcgggcaggagcttaggcttcaattatgtgcagaccatgcgctatattatcctgccgcaggcgtttaagaacgtactgcccgcgcttgcgaacgaatttatcgtattattaaaggaaacctctgtttccggctatatcgcgattgcggatttgacctatatgggcgacaggattaggagcgtcacctacgaggcgttcatgccgctgattgccgtcgcggtaatctaccttgtcgtcgtcatgattctgactaagcttgtcggcaggcttgaaaggaggcttcgcagcagtgaccactgatacaaacgcgcttgtacgcgtggagcatctcggcaagagctttggcgcgctccatgcgctctccgatatcaacctggaaatccagaagggcgaggtcgtcgtcattatcggtccgtcaggctccggtaaatcgacgctgctgcgttctttgaacctgctcgagcatcccacggaagggaagattttttttgagggcgttgatattaccgacccttctgtcgatatcaacaagcaccgccagaagatgggtatggtgttccagcatttcaatctctttccgaatatgtcgattctaaagaatatggcgattgcgcccatgaagctgctaaagctcagcagggagcaggcggaaaaggaagcgatggagcttctgacgcgcgtcggcctatccgacagggcgggcgcctacccgtcccagctttccggcgggcagaagcagcgcatcgctattgtgcgcgcgctgtgcatgcatcccgatgtgatgctgttcgacgagccgacctccgcgctcgacccggagatggtcggcgaagtgctcgaggttatgcagggccttgcaaaggacggcatgacgatggccgtcgttacgcatgaaatgggctttgcgagggaagcggcttcccgcgtgatttttatggatgagggcaaaatcatcgaggaaaacacgccggacgaaatttttacccacccgaagagcgaacggctcaagagctttctttcaaaggttttataagagctgcaggcgggggatttggacgtacggtccaaatcccccgccttatttatccgtttccatagtaaaaacaggcttttttatttaaaaagaaggacaatgcccccgtttagcttgcatttttgcaaattttgtccggagccgcccgttatcttcccttcctgtataagctttgtatattctttgtttgacagacgcagtttctcacgcacgatagcagaaacctttaccggcagcgggtactcacaattgattgtaagctctataatttcaccaaaggaaaaagcttcgccttctattatatattgtggcagtttgatttcagccccggcattttgcagtaggcccgcgtctgcagcataccgcgcggcaagctccccgctgttgcggtggaacccgtccagcaggcttggaggaagggattgcggggagacgcgggaataaatttccgcgttccaggtactgctgcaattcctgcatttatatatcagccaaacgtccagccgcctgtgctgggcgttcacacggaattgccgggaacaggcgaactccattttttttccgcattttttgcaatgcctcagtacaaccggcgcggcttggggccggacgttccaaataaatttcttcatcctgataattccttatttaagcggaaaaatggagccatcgctagaatgattgaaatcctttcgtaacaggccttccgccttcattattatggctaaattgtagcattggaattccctgtacccaacctaattgttgtatcttaaaaaaaggcgggaaaagggccggtacagcttataaccgtaccggcctgcaaatttaacttttatgttcttttttcatctgcccaatgattctttgaatactttttaaggataagtagtaattttcagccagcgtttccattcgttccccggaaaggtaatccgtataaatacgcgcgttcctttcctgcagttcccgacgggtcgtggttttttctccccaatcccttttatttgcgggaatccttggaatatagatgaattcaccgtccacgtattcctgaatctttgtgagcaattcctgcggcagaacatgtgctgcttttatatagctcattttgcgctcccaatcctgatttctttataaagggacagcaaaggctatctgcacacgtgtttttttaatcgctgcgacagccctgcttacgcagccataacgatgggattcatcataaatacgggtcctccttacaaatgcttttctgaatgaataaattttagcatggcgtaataaaatgaaaaacctcaaccttctttcgtaaaagaaaagaagaaacgcctgcaataggattatagacaaattgtcccggcatagcaagtgcagaaaataaatcaaataaagtgtaacctttcgcgggcggcggcggtatatataatgggaagggaaatttggatgggtggtccggccggcggcctccttcacaatgccggccggacgagcactggttcgaggccgcttttatggcctgaattttctctaatttaaaaaatgtcggataatttgacgaaattatgtgattttggaataaaatgccaagtttaaacagcaaatttacatcgctgttccacaaagataagaataatagctgttttttgttgacaaaaagggtttgtgcggttattatataagtacaaagtaaatatttagcaaatcattcgaaaggatgagacgcaaagctctgagtctaaggataaaaacttttatctatgatcgtcaagttgcaattttaaccgaaggtagaattgcaactttttttatttactggaaggatggttggttgtgaaaaaaaggcgttttgcttttgtgcttgcccttatcatggcagccacatcatctgtaacggcgtttgccgtacaagaggaggttccgacagaaccttcggcgcagacagctgaatccttcagcgaacctgcttccgctgccgaatcgacgattacctaccgtatcagtgatgaaatgtatcaaaagggcgttcggttttataataccgacgcgcaggagagaacagataccattacaaccgggcagccgtttcaggtaaagagttttaccgcgatgaagtataacggcgataagcttggcggcgtcagctggaagacgctgaacgagattcaaggctataaaatgaaaaacggagtacgctccgacattaccttggttcagaatcaggcaatttccacattggaccaagacaacattgacaaatccttaatttatgatatatatttttcccagggtactaacctttatttcgaagcgtcggcagggatttttcccggtgaagacgcggaaatgacggagattgcgacggtgattcccaaaagaatgtcagtcaggcttcaggatggcaccatcctgaaaaacggcgacaaattcgagatgcctgccggcggtactatccgctttcagatgtgtacgaataattgggacaccgatacctatacggacgacggccaggggcttgcgggtacaaaggtttactcctttacgcacgtcaaaggtaaagacaataccctgcgcgtcgataccaatacttactttatggcataccgtttccactttgcaaagggcgactacaataagcagaccggcatctcaggggtgctgtccacgccgctcgagagcctgtcggtgaacctgccgctcggctccacagtaacggtaaatgcctatcagaacatctcaaacaaggtttcgtcagccgatgtctttatcgcgacaggtgaggataagacgctttcgtacaccgacttcacatgggatttctgattttaatttcgtccattcatttctttgtttttttaaagtctgattagtcaaaaagggaggcgttatgcctccctttttgacatcctcagctaaataggtacgagtgcctgccgttacccatatttcagcaggctatctttaaaatgtaaaatttgtacaaaaacagaaagaaaattgcttgtaagttctataaacataaattcgaacattttgttgccgcagctatatctatatgatataataaccaatgcgtgactgcaacagatatgcgatgaagcgggaggttgcggcccttggggccggtttttccgtggagtatgtccgattttaaaccgggcgacaaagataacttttagaacaccatgacggcgcgtagggttgctgtgccttgtgatgttctggcgcttttcggctacccgggctgactgcaggtcaactcggtttttaaaatgctcatgaaggaacacccggcagggtgttacggatttcgaaaagcggcgcccgccaactaatattttaaggaggcgattcatgtggcagtcaaggaaaagataaggataaggttaaaggcttacgaccaccagctgctcgaccagtccgctgaaaggattgttcagacagcaaagcgcacaggcgcgagggtgtcggggccggtgccgcttcccacagagaagcagatcatcacaatcctgcgcgctgttcataagtataaagacagccgtgagcagtttgagatgagaacacacaaaaggcttatcgatatcttaaggccgtcaaacaagacagtcgaggctcttatgagcctggagctccctgccggtgttgaaatagagattaagctttaatctcagttccaaccaaccgaagcagacggggtcatgttggggcaagcccaaccaataaccttacaggaggcattataaatgcagaaagcactgatcggtaagaaggtcggcatgacgcagatcttcgacgaaaagggcaacgtcgttcccgttacggtcgtagaggcagggccttgtgtcgtctctcagaaaaagaccgtagaaaacgacggctacgcggctgttcagcttggttttggcgatttaaagccgcacaaggtgaacaaacccatgaagggccacttcgacaaggcgaacgtcgcgccgaagaggacgcttcgcgaattccgttttgacgataccgattcttacaatgtaggcgatatcgtaaaggcggacgtttttgctgccggcgacaagattgacgtcacgggcacaagcaaaggtaagggctacgccggcgttatcaagcgctggaacttccagaggctcaaggagtcccatggttccggccctgtagcacgccacggcggttccatcggttcctgttcttccccgtcaagggtttggaagggcaagaagatggccggccatctcggcgccgaaagagtgaccgttcagaacctgatggtcgtgaaggttgacgttgaaaacaacctgattgcggtcaagggtgctgtcccgggtcccaacggcggtaccgtagtcattcgcgaaaccgttaaggcttaagggaaggaggagttcacatgcctaatgtagcagtattggatatggcgggaaagaacgttggaagcatcgacctttccgagtctatctttggaattgagcccaatgccgcggttatgcaccacatggtagtcaactaccttgcgaaccagcgccagggcacacagtcggctctgacccgtgcagaggtttccggcggcggcaaaaagccgtggagacagaagggtacaggccatgcaagacagggctcgacacgttctccccagtggaggcacggcggaattgttttcgcaccgaagccccgcagctaccgttttacagtcaacaagaaggtcagaaggctggccatgaagtccgctttttcaacaaaggcggcgtcgagcgatatcatcgtgctcgattcccttgcaatagacagctacaagacgaaggtcatcgcagaaatgctcaaggctgtcggttcggagaagaaggcgcttatcgttctccccgaggttgacaagaaggtcatcaaatccgcaggcaacatcccgggcgttacgacggctcaggtaaacacgctgaatgtttacgaaatgctgaatgccgacaagctcattatcgtcaaggatgcggttgcgaaaatcgaggaggtgtacgcataatgacagcacaggatattatcatccgcccggtcatcacagaaaagagcatgctgggcacggctgaaaagaagtacacttttgaggtcgccaaaacggcgaacaaaatagagattgcgaaggctgtcgaagagctcttcaaggttaaggtcgcaaaggtcaacaccgtacaggtccgcgggcagcttcgccgccagggccgtacgcagggctataccccttcctggaagaaagcttacgttaccttaacgcaggacagcaagaatatcgaattttttgaaggcatgatgtaagcctgccggaaaaaacgttacgacaggcagaatgtatgggatacgccaaatcccgcaaagccatcatgaggagagtgaaaccaaatggccattaaagtatacaagccgactacaaacgcaaggcgtaacatgtcggttacagattattccggtctttcaaaggtggagcctgaaaagagcctgctcgccccgattaaaaagaacgcgggccgcaacagctacggaaggattaccgtccgccacagaggcggcggaaaccgcagaaagtaccgcattatcgacttcaagcgtcagaagtttgacgttacgggtacggtgctcacgcttgagtacgacccgaaccgcagcgcgttcatcgcgctcgtacagtacgaggacggcgaaaagacttatattatcgcccccaacggcctgaaggtcggcgacaagattgtcgcgggcgaaagcgctgatatcaagcccggcaacgcactgccgctccagaatatcccgaccggtacgttcatccacaacgtcgagctttaccccggcaggggcgcgcagcttgcgcgcgcggctggaaacatggcgcagctcatggcgaaggaaaacggcctagcgctgctaaggcttccttccggcgagctgaggaacgtcccgattaactgcatggcgaccatcggacaggtcagcaacacagaccatgaaaacgtgaaggtcggcaaggccggccgtaagcgcaatatgggctggaggccgacggtcagaggttccgtcatgaacccgaacgaccacccgcacggcggcggcgagggcaaaagcccggtcggacgtcccggccctgtaaccccgtggggcaaacccgcgctcggctacaagaccaggaagaagcacaaccgttccgacaagtatatcgtaagacgccgcaacggcaagtaaggcatacagaaaggagctttgaactatgggcagaagcgttaaaaagggtccttatgtacagcctgtgctgctgaagaggattcaacagatgaacgagacgggcgaaaagaagatcttaaagacttggtccaggtcttccactattttcccggatttcgtaggtcatacgtttgcggtgcacgacggccgcaagcatgttccggtatatgtcacagaagatatggtcggccacaagctcggcgagtttgcgcctaccagaacctacaggggccatgccggttccaagacaaccaagaaataagcggaaggagagtataggtaatggaagcaagggctaaatcaaattacgtccgtatttcaccgcgcaaggtctccattgtgcttgacctcatcaggaacaagccgtgcgacctcgccatggctatcctcaagcatactcccaaggccgcttgcgagccgctgcagaagctgctcaagtcagcaatggcaaatgctgagactaaccataatatggatgtttctaaactttacgtggcggaatgctccgtaagccagggtcctaccctcaagcgtattcgtcccagagcacagggccgcgcattcagaatcgataagaaaacgtcccacatcacccttgtgctcaaggaaacagaataacaggaggaggtacagtaaatgggccagaaagttaatccgcacggtttacgtgttggtgtcatcaaagactgggattcccgttggtttgcaaagagcaaggacttcggcgacacgctcgttgaggactacaacctgcgcaaaaagctgaagaagcagctctacgctgcgggcgttcccaagattgaaatcgaacgcgacgcctccaaggtgaggattcacattcactgcgccaagcccggtatggttatcggcaagggcggcagcgaaatcgagaagctccgcgttcagtgcgaggcaatgctcaaaaagccggttgcgatcaacatcgtcgaggtgaaatcccccgatttgaacgcgcagctcgttgctgagagtatcgcccagcagttagaaaagagaatttctttccgccgcgcgatgaagcaggcgatcggccgtgccatgaaattcggcgcaaagggtatcaagacccagtgctccggacgtctcggcggcgcagaaatcgcacgttcggaaatgtatcatgaaggaacaattcccctgcagaccttgagagccgacatcgactacggctttgcagaggcggccaccacctacggcagaatcggcgtgaaggtttggctgtacaaaggcgaggttcttcaggacaaccggaaaccccgtagggaaggaggcagtaaataatgctgttgcctaagcgtgtaaaatacagaagggtccacagaggacgcatgaagggcaaggctatgagaggcaataaggtcacgtacggtgagtttggcctccaggcgctcgagccctcctggattacatcgaaccaaatcgaatctgcccgtgtcgctatgacgcgttactgcaagaggttcggtaaggtttggattaaaattttcccggataagcccgtaaccgagaagccggctgaaacccgaatgggttccggtaaaggctctcccgagtactgggtcgctgtcgtaaagcccggcagagttatgttcgagcttggcggcgttccggaagagaccgcaagagaagcgctgcgactggcggcgaataagctgccaatcaaatgcaagtttgtcaaaaaagaggaaacgggggttgagcagtgatgaaggcttccgagcttagagaattaacggtcgaagagcttcaggcgaagctgaaggacctcaaagaagaattatttcaactgcgttttcagcttgccgttaaccagctcgataacccgatgcgcatcagtgctgtgaaaaaggatattgcaagaattaacacgatacttcgtcagcgtgagctggaaaacagcgcgaaggcataagggaggagtgagaccgtgagcgacagaaatatgagaaagaccgacgtcggcaaggttgtcagcgataaaatggacaaaaccgtcgtggttgcaatcgaaaaccgcgtaaagcataagctttacaacaagattatcaaacgtaccatcaagctcaaggtgcacgacgagaataacgagtgcaaagtcggcgacagagtacgcattatggagacccgtcctctttccaaggataagagatggagactcgtcgagattattgaaagagctaaataagttatttagcggctttgagaaaaggaggaacgcactgtgatacagcagcagacctacctcaaggttgccgataacaccggcgcaaaggagttaatgtgcattcgtgttctcggcggtaccagaaggaggtacgccaacattggcgacgttgtggttgcttcggtcaaaaaagcagcacccggcggcgttgttaagaaaggcgacgtagtaaaagcagttatcgtacgctccgcaaagggcgtgcgcagagacgacggcacgtatatccgcttcgatgagaacgcggccgtcattatcagagaagacaagaacccgaagggcacgcgtatcttcggaccggtggccagggagcttcgtgacaaggactacatgaagattctttcccttgcccccgaagtactttaatcggaggtgctcactaaatggataaaaaggttcatgtaaaaacgggtgacaccgtcatcgtaatcagcggcaaaagcaaaggcaaaaaaggtaaggttatggccgtcagccccaaagagggcaaggtcatcgtagagcgtgtgaatatggtaaagaagcacgtaaagccccgcaaaatgggcgagcccggcggtatcatcaaggccgagggcgctatgtatgcctccaaagtccagatcgtttgtccccgctgcggcaagccgacccgtgtaggccataagctttatgaagatggcacaaaaggacgcatttgcagaaaatgcggcgagtcgctttaaggaggataagaaatggctaggcttaaggaatattacaagaacgacgtcgctaaagcgttgatgaagaaattctcttacaagagcgtcatgcagattccgcagctcgagaagattgtcatcaatgtcggcgccggcgaggcgagagacaactccaaggtaatcgacgcaatcctcacggatttaagcgcaattaccggacagaagccgatggtctgcaaggccaggaagtccgtcgcgaactttaagctgcgcgagggcatgaatatcggcgcaaaggtcacgctcaggggcgaaaggatgtatgagttcttagacaggctcttcaacgtcgcgcttccgagagtccgtgacttcagaggaatcaaccccaactctttcgacggcaggggcaactacaatatgggcctgaaagagcagcttattttccctgaaattgattacgacaagattgataaagtccgcggtatggacatttgctttgtaaccacggcgaacaccgacgaagaagcacgcgagctcttgacgctcatgggcgctccgtttgcgaaataaggagggaatattgtggctaaaacttcaatgaagattaaacaaaagagaaccccgaagtattcctcaagggaatacagcagatgcaaaatctgcggcaggccacacgcctatcttcgtaagttcggaatttgccgtatatgcttcagggagcttgcttacaaaggcgagatccccggcgtaaaaaaagcaagctggtaagcaaaggaggttaacggtatgcagattactgattcaatagcagatttgcttacaaggattcgcaacgcgagttcggcaaagcacgacactgttgaaatccccgcttccaacatgaaaaaggccatttgccagattcttgcggacgagggttatatcaaaggttttacagttatcgaggacggcaagcagggcgtcatcaaggtcacgctgaagtacggcgagggcaaaacctccgtcatcacgggcctgcgcagggtttcaaagcccggcctgcgtatttacagcaatgtcgaggatatgcctaaggtcatgaagggcctcggcatcgcggtcatttcaacatccaagggcgtcatgacggaccgtcaggcgcgtaaggagaatgtaggcggcgaagtccttgcatttatttggtaaggaggtgcgaacatgtctcgaattggaagaaaacccataaatattcccgccggcgttgacgtaaaactcgcggacggcgttgtaaccgtaaagggcccgaagggtacgcttacccagaagattcacccgaacatgacggttaccatcgagggcggcgttgtagaagtaacgcgcccgaatgacgaaaagctgaacaaatcgctccacggccttacgcgttccctcatcgccaatatggtagaaggcgtaacaaacggctatgcaaaggagctcgacgtaaatggcgtcggctaccgtgtgcagaaacagggcaagcagctcgttatgaacctaggctactcccatcaggtaattatggaggatacctccgacgttaccattgaggtgccgaacccgaacaaaattattatccgcggctgtgacaagcagaaggttggccagtttgccgctgaggtcagggaaaagcgtccgccggagccttataagggcaagggcatcaagtacgtggacgaagttatccgccgcaaggaaggcaaagccggcaagggcggtaagaaataattaaaggagtgaatgacaaatggtgaacaaagccgatacaaacgcagcacgtttacaccgccaccgcagagtgcgcggcaaggtcagcggcacagcacagcggcctcgcctgaatgttttccgctccaccaatcatatctacgctcagttgatagatgacgtacagggtgtaacccttgcggcagcttcaacgctggacaaagagattgctggttatggcggaaacaaagaggcagccaagaaggttggccttctgattgcaaagaaagcagcagataaaggaattaccgaggtcgtatttgaccgcggcggttatatctatcacggccgtgtcaaggaattggccgaaggcgcccgcgagggcggcctcaagttctaagaaggggaggaataactttggctattattgacggttccacattggatttgaaagagcgcgtggttgccatcaaccgcgtttctaaaactgttaagggcggccgtatcttcaagtttgcagcgctcgtagtcgtcggcgacggcgaaggcacggtaggcttcggcatcggcaaagcgggcgaagttcccgacgcaatccgcaagggcattgaggacgccaagaaaaacctgatgaaggtttccctcaggggcaccacaatcccgcacgagattatcggtgaattcggcgccggcaaggttctcttaaagcctgccgctcccggtaccggcgttatcgccggcggccctgtccgtgcagtcgttgaagccgctggcatcaaggacatcaggacaaaggccctgcgttccaacaatccatgcaacgtagtccgcgcgacccttcagggcctcggcgcgctgcgctcggccgaccaggttgccgctatccgcggtaagtcggtcaaagaaatactttaatagggaggaagcaaaatggcacaggtgaaaatcacattgaaaaagagcctcatcggttctaaaaaagaccagattgcaaccgcccagtccttaggccttcggaaaatcggcgatgtgaccacacagcccgataatccccagacccagggcaaggtagcaaaaataatccacctcatcgaggtaagtcaagcgtaagcaaggaggtgcgaagaaatgaagttgcacgaactttcaccggtcgaaggctccaaaaaggacgccaagaggatcggcagaggccatggttcaggacagggaaagaccgcaggcaaaggccataagggccagaaggcaaggtccggcaaaggcgtacgcgccggttttgaaggcggacagatgcccctgcagaggcgcgtcccgaaaaggggattcaacaatattttcgcaaaggaaatcgtagcgattaatgttggcagcctcgagaaatttgaaaacggctccgtcgtcgacgagcaggcgctcgtcaagatgggtcttgtaaaaaacggtttcgatggaattaagattctcggaaacggtaatcttacaaagaagctggacgttaaagttaccgctttttctgcttctgcaaaggagaagattgagtcggcaggcggaaaggctgaggtggtctaattgtttaaaaccattcaaaatgcctggagaatccccgatttaaggaagaaaatcctatttacccttttgatcatcgtagtattccgcgtcggttcggttatacccgttccgtttctcgatatgagcgcccttcagagcctgatgggcggccttgatcagagcggttcaatcctagcgtatctgaatacactttcgggcggcgctttctcaaacgcaacgttgtttgcaatgagcgttaccccgtacatcaacgcatccatcatcattcagctcctgactgtcgccatcccggcgcttgagcgccttgccaaggaaggcgaggatggacgcaagaagattgcgacgattacccgttatgtaacggtcggcttaggcctgttacagggtaccgcttactggtattacctgtttgcctcgaacgtcgtaacctacaagagcggctttgaatgtgtgttcgcggcggccgttatcatcctcgcgtttacagccggcacggccctgatgatgtggctcggcgagcaaatcaaccagtatggtattggaaacggtatttccatcctgctgtttggcggtatcgtggcaagaatgcccgttaccatttcccagctcggacagtattgggagctcggctccaacggacagatgcagtattatgcgctggtcccgctgtttgtcgtgctgttccttgttgttatctgggttattgtatttatgaacgattcggagcgccgtatccccgtacagtacgcaaagcgtgttgtcggaaggaagatgtacggcggacagagcagccacctgcccataaaggtaggcttaggcggcgtcctgcctatcatctttgcaagctccatcctttctatcccgagcacaatcgagatgtttgtcccgaatccgaacgatttctggaaaggcttcttcgacctgtttgcttataatggagtgctttactccatcctttacttcatcctgattatcctctttgcgtatttctatacgaccatccagtataatccggttgaaatgtccaataatcttcgtcagaacaacggcacaatcccgggtatccgtcccggcaagccgacgactgactttatcgctaaaatcctgtcgagggttaccctcatcggcgcattgttcctcgctttcatcgcgctgctcccgattgtttacagcggtgctaccggcatgcgcggcctttccatgggcggcacatcggttatcatcctggtcggcgttgcgctcgataccgtaaagcagatggaatcccagatgatgatgcgccactacaagggcttccttgattaaggcttttaaggagagaagattatgaatattattctgttaggcgctcccggtgccggcaaaggcacccaggcagaggttatctgcgagcgtttatccatccccacaatatcaacgggtaatattatccgtgaagcgctgaaaaccggcacagagatgggtttaaaagcaaagtcatatatggacgcgggccagcttgttcccgatgaggtcgttatcggcatcatcaaggaccgcctccagaaggacgactgcaaaaacgggtttatcctagacgggttcccgcggaccatcccccaggccgaggctctggacaaaatgggcgttgtcatcgacaaggtaatcgatatcgaggttgccgacgagcgcatcgtcaaacggatgtccggacgccgtgtctgcgaaaagtgcggcgccagctaccatatggagtataagctccctgcggcagacggtgtttgcgacaagtgcgcaggtacccttgttcagcgcaaggatgaccatcccgatacggtcaaggcgcgccttgacgtttaccacaaggaaaccgagcccctgaaggattattacgccaagcagggcaagctcgcaattgtggaaggacaggaagaaatcggggataccacccgcttgattcttgccgaagtagaggcgtaactatgattgtgataaaaactgcccgagagctttccaaaatgagggacgcagggcggatttcttcgagagcgctgcgcttagcaggagaagcggtcgagccgggcgtcacgacgctcgaaatcgacactgtcgttagaaaatacatcgaggaacagggcgccaagccctcgttcctcggttatggcggcttccccggcagcgcgtgtatctctatcaataatgaggtcatccatggcataccaagcaaaaaacgcactctcaaaaagggcgacatcgtcagcatcgatatcggcgcttattttgaaggcttccacggcgacaacgcatggacgttcccgtgcggggaagtaagcgaagaagcgcaggcgataatggacgtcacgagagaaagcctgtttgaaggaattaagcaggccaaagcgggaaacaggattggcgatatagcaagcgccgtccagcagtatgccgaagctcgcagctactcggtggtacgcgatttcgtcggccatggagtaggtgcgaagttgcatgaagaaccaagcgtaccgaatttcggcacaccgggaagaggtgtgcgcctgttgcccggtatgacaatcgctattgaacccatgattaacgcgggtactcaccgtgtaaaggtcctcggagacaaatggacgacggtaaccgtcgatggcaagctgtcggctcattttgagcattccgtagcaatcacgccggacggtccggttatcctgaccaagcccgactgatgaggtgagcagatgcagatagtggaaggttccgtagtaagagcgacagcgggacgcgacaagggcggcttttttgcggtcatcggattcgatggcgcgtgcgcgttactttcagacggcaggcgccgtaagctcgaaacgcccaaaaaaaagaagctcatacaccttgctccgaccgctaccgtaataccggcaagctcattaaagacaaacagacaaatcagagaagcgctccacccgttcaatttcggcggggaagagctttaaccgtcttaatatgaggaggtaagcttatgtccaaacaggacgttatcgaaatagagggtaccgtaacagaggcgctcccgaacgcgcagttcatggtggagctcccgaacggccatacgatactggcccacatttccggcaagctgcgtatgaatttcatccgtatcctgcccggagacaaggtcacggtggagatgtccccgtacgacctgacgaggggccgcatcacatggcgcagcaagtaatctgaacacggctgtccagattgtattccaccgacagagcttctagtgaaaggaatgattatattatgaaagtcaggccttctgtcaaaaagatttgcgaaaagtgcaaagttatcaagcgtaagggaaaagtcatggttatctgtgagaatcccaagcataagcagcgtcagggctaaaataaaaaatatcacgcgcttcggacggctttgccgtgccccagatattttaatatccttcggcacttcaaatacgcccgctgcacgcaatctttttcattttctttgaaccggaacgaattgtaacttccggtttgctgcatgaatacaaataaacgatttatcggaggtgcaacagatatggctcgtatcgcaggtgtagacttgccgagagacaaaagggtcgaaatcggcttaacttatatctttggaatcggccgcaaaacagcaagcgacattgttgctgcaacaggtgtaaatccggacacacgcgtcagggatttaacagaggacgaagtatccaagctcagagaatatatcgataaaaactgccgcgtggagggcgaccttcgccgcgacgtcgcatttgacatcaaaaggcttattgaaatcggctgctaccgcggcgttcgtcacagaaagagcctgcccgtaagaggacagcgctccaagacaaacgcacgtacccgcaagggtccgagaaaaacgatggcaaacaagaagaaataagtgaaggagggttaacctatggcagcacctaagggtaagaagaccacagtgcgcagacgccgcgagcgcaaaaatatcgagcgcggggcagcgcatatccagtctacattcaacaacacgattgttacaatcacagatacacagggcaacgccgtttcctgggcgagcgccggagagctgggcttccgtggctccagaaaatctactccgtatgcagcgcagtcggctgccgagacggccgcaaaggccgcgatggagcacggcatgaagtccgttgaggtttatgtcaaaggaccgggcgcaggccgtgaagccgcaatcagagcgcttcagtccgcaggactcgaggtcaacatgattaaagacgtgaccccgattccgcataacggatgccgtcctccgaagagaagacgcgtatagtcataataaaggaggaaaaaaacaatggctaagaacatgcagccgattgcgaaacgttgcagagctctcggtatttctcccacagtgatgggatattccaaaaagacttctaacaggaatccgcttggcaattccagaaggaaaaagagcgaatacagcctccagctgacggaaaagcaaaaggtaaagtttatttacggcattcttgaaaagcagttcagaatgtactacgaaaaggccgaaaaatcgggcggcaaaaccggcgaggtcctgctcaccacgattgaacgcaggcttgataatgttatattcaggctcgggcttgcttctacaagaagggaagcaaggcagctcgtcaaccacggccactttacagtcaatggtaaaagggtcaacattccttcttacctaattaaggttggggatgtcatcgaggtttgcgaaaaaagccgttcgacaaacagatttaaaaccatggcggaaagcgatatgctcgttaccgttccgaaatggcttgaaaaatctcagaatccgctcggcggaaaggttcttgcgatgccgcagagagacgatattgaattcccggttgaggaacacctgatcgtcgagttgtactccaagtaatcctgcagtcgtttaaaggtttacacagggcaggcagactgcccaatgttaggaggaggttcgctgaatgatagaaattgaaaagccaagaatagaaactgaggaattatcaaacgacggtacctatggcagatttgtagtggagccgttggagcgtggttttggcaacactttgggaaacagccttagaagagtgcttctttcttctcttgagggcgtagctgttacttcgttgaagattgacggtgtgcttcatgaattttccaccattcccggtgtgaaggaggacgtaaccgaaatcgtcctgaacatgaagggacttaccgcaaagcttcattgcaatggccccaaaacggttgaaatcagcgcggagggaccctgtgaggtcaccgccgattccataaagtgtgacagtgaagttgaaatcctgaatcccgacatgcacattgcaactttgggcgacgacgcaaagctttatatggaaattacccttgataagggcaggggatatatccccgcggagcgcaacaaggtaatcaacggtaccaatgtaatcggcgaattgcctgttgactcaatctatacgcctgtgctgaaggtgaactacacggtggaaaacacgcgtgtcggccagattaccgactatgacaagctcacgcttgacgtgtggaccaacggcgtcatcaacgcacaggaggccgtatcgcttgcggcaaaggttttgacagagcacctcaatctcttcgtcgatttgtccgaccagggctacagcacagagattatggtggaaaaggacgacaagggcaaggaaaaggttcttgaaatgacgattgaagagcttgacctttccgtccgttcctttaactgcttaaagcgtgcaggcatcaatacggtggaggatttaatcaataagtctgaggacgacatgatgaaggtccgcaacctgggaagaaaatccctggaagaggtagtttacaagctgaactccctgggcttcagtcttcagaaagacgacgaatgataacggcccattcgcaaatcacaaggtaaaggagtgaattttcgatgcccggtacaagaaaactgggaagagctaccgctcacagaacagcaatgctcagagcgatggtaacttttctcttagagaacggtaaaatagagactacggtcacccgcgccaaggaggtcagctccctggcggagaagatgatcacaatcgcaaaggaaaacaatcttcacaacaagcgtatggtgatgtccttcgtaacaaaggaagacgtcgtatataagctgttcagcgagattgccccgaagtatgccgacaggaacggcggctatacgcgtatcacaaagctcggcccccgcaggggagacgcagctgaaatggcaataatcgagctgatttgatttcagcttggcaaagcaataaaaacacggcgcagtaaattttactgcgccgctttttataatttataaagttcattcacgcttgttgaatcacagtaatgcatacaataagccgaaggaaggtcaaaacggcttggaaatcaggcgtttttcattgaaatgcgaccaaaatagacgacttaagccgcgtatatacccagcgctggaaaagtagtacacctttattccgcagcattatctcggctttataacggatgacaagtggtctggggacttatctcaggcgtattgacgaaactctggcttgcaggtgaaaacggccagattaccgtcgtctgtacatacgcgcctgcatgggactgcgattacaaaggctgggagaaatattgttttctgccgcaggcgtgcgggaatggtaccggaacaaagctgatgcgcgcctccctgggcagtttaaatccaatgggcttggcaatatttatttatgggcttttgaaaaaaattttccggcgcggctgttttatgaaaaaaactgttttccgttaaatggagacaaaatttcagaaacaaccggcagcagggagatttattcagccagatatatataccagcccgcaaggcaatgtcctgccaaaacagaatagattctttttaacagataaaaaagcccctccggtaatttctctccggagggcttttgggcttatgttacgcagccggggtatcaagccgtttgccggagcgtttcttattggtacgcttccacttgaggtcagcggccgcgataatcccatcggccgcaaccaataggaagactggagtaaagttcataaggtacctggagcgggtttcccagacgaggaagaacaggaaaacgccgaaaatcaatcccttcagcagtacggaaaaattcatgcccggccttataattgaggctatggctgaaaggcatatcatcagcagcatcattacatgaaacatattgcttacaaaaacaaagctgttgtggtattttccgtttttcaagataaattcatgcataatattgggctgttgcggttcattccagatatgtttgctgataaaataggtaccgtccgaccaagtccacgcagccttttttgtcagatggtcgaacaggccgtccggtccataatcctgcaggcgctttttgatttcctcaatgtttgctgcccttttttcatcgtacgtaccgcttttgcgtgtgaacctgctgtctgcctggttaaagccgccgttacccttaagccccatcataatccagtgggacatgggatattgctgctcgttgagctcctcggccggcgcaaaatttagtgttgacaccaaggaatgaaacgccagcatacagaccaaaaagacggcggccacggttgacatacatgcaagcgctctttttaccggtacacttaaaaataagaacacaaccgcagcggcgagaataatggcaacgcttcccttaagggaatatccgataaacacaagggcagcaaaaagaaacaggtaaagatatcttctaaatgttttcttcgttttcaaggcgctgatatacagaaatatagggatgatgacaaacggcatgctcagtgtatcggtataaaagaacggcgtgtaggtatagaacggaaggaagaaaaagcacaacagaaaggcaaaaaacgcgcctgaggcggaaaatattttctttgccgtctgataagtgaataggactgatacactcagggcaattacgtttaataagacgcctgctgaaagcggtatttctccaaaggccagatataagacacggtagtatccggttagcagaagaaaaatgccgttattattaggataacgcgccatatatccctgtgcggagggatacaaatcgtaagtgtttgtgaaggagcccgtttgtgcgacgctttttgcaaaagcgttaaccttacccaaatccgttaccggttcacacatcagcaggtaccccattgcgagctgcaataaaagcataacggcaaacataatccaaaacgccttgtcataatttttgacatgatgtttttttgcatgcttctccaacagtttataagcgataatggcaattgcggctagcgctatgccggataatatacaaaagacgttttgagcaccaattgtaagaaaaacgtttaatacaatccatccgaacgagagcagaaatataacatggaacacacggttcgttttactgaatctcattttttcctccttgggtgaacttaattcacgtattttttattatactaattaccattaagcaagtcaattcgttacaaaaaagaattaaaatgtaaaacagaaaattatgattgcaattgcaaaagaaaaaagctataataaaaacatccgcccgtggcgcagctggataacgcaacggattccgattccggagatcgggggttcgaatccctccgggcgggccaaaggagacaaacgcaaaacaaaccaagtgtttgtaggtgtttgtctttttttcttgtaaaaatagatgtcaaataggatgtttgagagcagaaacggggtaaaaccgtttctgctctttctatataaacctataaaaatcccaactttgaaaggagtatcgttatggagctgaacaaaatcgaatctaaactatttggccgtatctgttacggatttacccgtcgtggagatggcatcgtcgtaatcgatgaagagaaatcggaggtggttcggtcaattttccggatgtatcgagaaggtaacagcttggagaatattcagaaaaaactgtatgagtcaggaatcccatccccctccgggaatccgagatggacacgtgatgtcatcgacaaggtgctaaccaacgggaagtatgcccgtggaatcatatcctttgaggactttgtcgacgtacagtttacgaaagaaaaagcgtgccggtattgtagaacctgataaaattcaccatactatccttatcttaactttagaaaggatagttgtcatgagctcatcgaaagacaggattacttacaccgccgcagtggaactttacctcaagccgcttctccaaaaagggatcattcgttatgaaacctattacgacgcagggaacctgttgtttgaccgatttgggatgtatcattttgaacaagcttgccggcctacgaaaaaggtgaccaaagagacacggcagaaaccgccgcaaagtcagtacccagactatgtttccctcaccgagttggccaagcagttgaagcatggtgccccgaaccaagtcattgcaggatggctgaacaggaaaaacaccaaggagtatatcgagctgtggaggcagaagacaaactgctctgacgggatcgttacacaaagggggaatcacggcggaacctacgcagcccctgccatcgctggctatttcatgatttgtatgtcacctagagttgcgttgcagttcatggagcaaaccattgaaaagagggtggctgtgcatggataaaaaggtcatcgagatacctgcgagagagctggacatagctgaaacgaacaaaccgctccgtgtcgccgcgtattgccgggtcagtacggacaaggacgagcagcagaacagcttggagatgcaggtgaaatactataccgaaaaaatacagggaacacccaactggaaactggccggaatctttacggatgaaggaatcagcgggactaccgacaaaaagcgtcctgagttcatgaggatggtgcgcatgtgtcaaggagggagaatagaccgtatcctgacgaaatccatctcccgattttccaggaatacggtggactgtttatcctggatacgcaaactgaaagcgctcggcgtatctgtcctgttcgagaaggagggaatcgatacggcggaaagcatgggagaaactttcctgacttggttcagcgcgtttgcgcaggcagaaagtgagtccatcagccagaacgtgacatggggcgtgaggaaaggattcaaggaaggccgctacaacttccattaccatcatttctgtggttatgaaaaaggcccggacggacagccatcgattgttgaagatgaggccgtcatcatccgcaggatttttgcctcttatttggaaggagtgtcgttacgcggaatcaaagaatggctggaaaaagaagaagttccttcgccgtccggcatgcagcagtggaactccaacacaatatggagtattttgaacaacgaaaaatactgcggggacgtgctatgtcagaagacgtataccgcagacttcctgaccagcgacgtcaggaagaacaaaggagagctgccccaatacttcatagaggacaaccaccccgcaatcgtcacaaaagaagtgttccggcaggtccatgaggagatgcagaggcgggcctccgtctttaagccgaaagagaaaaaaagcaggtacagcagcaagtatgctttgaccgggaaggtgacttgcgcggaatgcggcgcactctaccgcaggaccacatggacgaacagggcaaaggagagaaaaatcgtgtggcgttgcataaacagactggaaaatgggacgaaaaactgcaaggaatccccctccgtaccggaagaagagctgaaaaatgcggtattgaagcaactcaaaacgaagctgtccggactcgatgttgttgcagtggtcactgaatgcctggagcagctcggaatcgatattccacaggaactggaaaaattgtcactcacgcaggatgatcgtctgacagattgtttcgatatactggtacggcaaacagtacagaaagtcatggtgtcaaaaactgatatatgtataatttttgtttaataagttgaaaatactggaaatatgtgatatgatatcacacagaaagaaagttgcaaatattatcgaagggataagatcattatgagcctcgaaggcggtggaagggccgataaatatggaaatcagtacgaaaatagatatttagcaaggctgcttttgaggcttgttaatgaattatttgtttcaattgtagtagagccagttggacttgaaggggatggtgttgaatttattactactgattctgatggaaataaaacgtattatcagtgtaaagcgagtaacacaacccatgcttattggagtatatacgatctcgaacgctataaagtttttgctcgtacgaaaaatatagtagcaagaagtaatcaaaattcatatttttttgtctctccattgcaatacaatggactagatgagttatgtaaacgcgcacgaacgaactcatctcctcaggaattcttagaatatcaactaagcaatacgcgattaaaagatacttttactgactgtgctaattattacggtcttgacataaaagctccattggaattgaaacaactcatcaatatactagcacattgccattttgaacaatatccaactgggatagaggcagaaaaggatctagaagaacatgtaggaatgctttttacaggaaaagctgctacggctaggcagttactagaacaatatgtaaatgatacaggaaaatttggtgtaatacttactgcaaaagatgttgttgattatatggcatctcatggcgtacatattcgaaactatcgatttgatgataaagttctgtcaagaattaattgcttaaatgaagtgtattgggggatttatcaaccaattggcggtcagcttattcatagaactgcgactgattccataattgaacaaataaagaaaggaaattcagtaattcttcatgggaaagcgggttctgggaaaagcggctgtatccaagaggtaataaatttcttgaaagcttcaggtgttttatatctcagtattaaattggataaaaactcccccgtgatgtctgcagataaatatggaatagatcttgggcttccgcagtctccagtatactgtttgcatacattatcagctgggaaagaatgtgtcttaattttagatcaactcgactctttacgttggaccagcaaccattcagcaagagctttagatgtatgtaaagagatgcttactcaagcagaggctattaataataatgaaggtggaaaaatttccattatatttgtaactcgaacctttgatcttgaaaatgataaaggattacagttgctatttgataataaaaattcagatgtatttatttggaagaaaatatgtgtagatctactttctaataaaaatgttcaggatattataggtgaagattatcctaaattgtcaaatcgcctcaaaattctattacaaaccccttcgtctttatttgtatggtcacgcttagataaaagggaaaaaactaatagtattacttcggtatatcaattaatggacgcatggtggaatcaagtattagcgaactctgaatttaatggagttcctcagcatgatgttcaactttgcaaagatgatattgtggccaagatgagtgagaatacaatattttcgcttccaatttatttatattctgacagtcaaaaaataattgatttatttgtatctgcggggttgatgattaaaaatcaaaatacaatatcatttacgcatcaaagctttttagattattttattgcttgtggtacgatgagagaaattttcgcaggcaaagaactatttgaattgattggtggcgatgaaaatcaaacaccaaatttacgttatcgtctattaacagtgttgcaagggttacttgattcagatgccgccatgtttttaaaacaaagtaaaggcttacttaaggccaaaactgttaggcattattttaagtgtgcggtcttcgaagttgttgggcagtgtgatcaaattaatgatgccatatatagttttgtggacttttatcgggttaattctgagtggcatgattatgtcattcaaactgtatatatgggacatccattatttataatgcagctgaatgcatcacaagaatacaaatggatggaagacgagggcattacattactaagttcaatcaacagcaaagctcctgactttgttgttgatgttttgcgcccttacagttttatgaacgtaaaaagagataaaaagatatttgccactttatgctttaatgcagcaaatgattctgataatatgtttgagtttagaatgagcttactaaaccgtcatgttgagttttttgacaattttttgttttcagaactaattgaaagtaagtcggaacgtgcagttgtagttatgaaaaaaattctgcaacagaaaattatatggaactcaaaatctatgtattttggagaaaaaaaggaattaaaaaaatatgcttgttctaattatgacattatagtaaaaaatttgtttgaagagatatgtaaagccaccaacgcattattacctccttggccacacttcaattttgacaaggaatatcaaatttggacagagggcgaatatgacgaatcttcggtgcgtaaaattgtcactatagtaaaatcagctttagaagaatttgctcagagtgatcctgaagggatgctctcgtttttatcaagtttaaactctcaaagatcagtagtgggtcaagaactaattgctcatgcaataagtaagttgcctacgtcttacagcgatgaagcaataaaatggcttttatcagattttgaatatactgtttttgtgtttactgacgatcaatcagattatttatcgtacacaaaaggaattcttaaaaagttttctccgacatgcaataaaaatttatttcacgagttggagcaggcaatttgtaattggaaagatgattccaaaaaaatggttagtatttataggcatcgattagaaaccaatcagcagaaaaagtgggaaccgatgtattatgcttattgggggcattttcaaaaagaactattgccattcatggatttttttagattgtcttcatactctaaagagttgcttggcgttttaaatagaaatccatggattcatgcgcctttctattattcgggatttaaaattggcccaactaaatttgtagcatcccctattgatggctatactgataagctcagtgataaatgttggttgaaaattatttctactccaaatgaaaagatgaaagggcattggagaggaaaagaaacagatgaatactatattgaagccacacatgatgcattttcatcgtcactttcgacgcaagcaaaaaaacaacctgcacgatttgctaggcttgcgctattttttccagagaactgttatgatgggtatattcatgcagtaataaatgcacttgataatcgtgatattgaaagtgaagacgaaaaggttgatgttgagcttacttgtaaggttataaggaagataagcaataatctagaatccaatatggtaaagagtatagcaagattaatagaacacagatccgacgaagaatggccggatgatattatagaacttctagtaaaaatagcacttgagtgtgctgatttaaaatataatgattattctattactgagaaaaataatcatgaaaattgtacgcctcaatcactactaactgaatctttagatagtgtgagtgggtgcatactacgtgcgtttgcgcaactgctctgggagcatcgagaaattggacaacgaattaaacaagtaattaccaatttgaacaggaactcaaatgatatagtccgggttggaattttgctttgtatagttcccttttataatatagatcaagactttgctattactacatttaaaagtttgctgttaaatgatttgcgcttgttagctattccgggagcttttcaacttctatcccatgactattgcaataaccaaagcttttatagatctattttaatcaaagcatgcaattctgaaatagaagaattgtcaatttgttctgctggttttgtgtgtgcaatggttatatttttttatgatgaggcgctgttaaattttatttttacatatgatttttcaccaaaacaagaaaatagaatatgcagtcaagcggcatcttcttttaatcaggaagagtatcatgaattgagtgaaaaaatcttaacatatctaatagatacatcctcttcaaatttacagagccttagccatttatttaaagatagtcatattgtaattgagcgtgataaagaatttttgataaatttaatgcaatccaaacaaagcgtcaatcaattacgctcttttcttagatttttaaatgaaagcgatgaggatattataaaatttgctgatgtttttaaggctgttggcaaaggcattacatgctttcctacagattggagcagcagattaatcataaatgatttaatacaatgtgtaattcgtttatttgataaagggaaggatgatcttagagttagaggtatttgtctcgatatttgggatgacttatttagaagcaatctgtatgatattaagccgttgtctgatatgattgatgattttgcgtaagacgaaatatcagccataagagtgccacggcggaactcaacgcttgttgtcctatatcctcaaacaattatagtataaatgtatactccatttgttaaagatgtaattttaggtttttatgtttggtttcttttttgttgacttgcggttttggatatgctatactacactaagtgttttaaaaaagagtatttactgtacttttctttatgtgtgccggggtatctttttggcagcacaaacacaattgcacacccattgaaatctgaacccgttagggttagacgtcaatgggtgttttgttattatgcttgattttatgcggctttcagccgcttttctttttagactagaattggacataaaaatagaaaaagacaaaaatagaaaagaaaagtcctaaaccaataaatctgaaccgtgtttgtataaggattacgcactaatagatgccttgtttccgtgcgtagtctgcttcaacttgttccggcgtcttgtattgcatatttgcgtgtggatgccgagaattttcagagaagaattgacagttttttccactaagttatcataatgaatgaaaaggatgatgaaatataagtgtgtacacatgagattttattttgctaatcataattatatgagctgtattttttattgtgtaaaagttttttcaattaaatattgtttttttagtaaaaacatggtaagatattaatataaatgggaatatatttaaaaatatcctatttttattaaacgtaatttttaaattaccaacattctatgtaaaaggggaaatgcaaattatggctgatatagtaagaacatcattagaaaatgaagaaccctgtctcattcgtgatttattagattggggtagctttaatgatcatttttttgagatttgtaatacaaggtatggtcgggtctatgaagacggacaagcaagagcaactggcctacaaaaaaagtgcttccaaagtgaatactttcaatctaatcaaaacttaattgtacaggggccaacttctgcaggaaagacctttatcggagaagttgcagccttatctgaatgtcttaaagacaagtctgttatttttttagtacctttaagatcgatggttagagaaaaatatattgatttaaagaaatattattctgatgaaaatattattggagatatttgtgcatcttcttctgattatcaagattcagattataaaattgcaactggaaatttttcaattgccgttatagtgtatgaaaaatatttggctttgcgtgctgaccctaataatagtattttgaaaaagtgcagtcttgtaattgtggatgaaatgcaaatgttaatagattcacgtggagctaaattagaagctgccattgttgatattaaaagagaaaatcaaattaaatgtaaaaatattagaattctaggattaacaacaacgttctgtgatatgcgtaacgtatcagtttggcttgataatgctgcaattctaattgatgatgagagaccagttgcgttcaaagaatatgtcatttctccaagcgggaaatataaggcgcgttttactcctaaaagtaaactatctaccccaatagatgaagaaaatcgttatcctaatgtttctgctaaaaaaccttctgaacctgacgatactcttgttcgtcgagagttgctactgagtttaatcaagcaacttgtaaaagaaaaagttgatattggtgaaagatgccctaaaattctagtttataatgctgataaggaaaatattgaacaactttgcggttccgtaaaaaaaatgtttaaaacagtgccgttacatactcttgacgccaatagtgttacatctaagcgattagaacttcaacgtttatctttggacaacgaagaagaggttctttttaacagatatatgcagtatggggtaatattccatcatgctggattatcccaagaactacgagcctacattgaagatgaatatcgggataataatggtctggtaaatgttattttcgcgacagagactttaacaataggtatcaatatgcctattgataccgtaataatttatgatttagagcggccagatggaactctagaaagacgagatctatatacttatgaatataaaaattatattggtcgagcaggaagatttggcattggatcttatcccaatgaccaaaatataggacaaagttttttgttgatcgatagagacaataaaattaatttaaattttcaaaaatatgttttatctggtccggtattaataagttcatcattatcattatcggggttagatgtccttccatacgctttgagttgggcatctggaaaacagcaaagaagcgaaatcaaccaagaagaattagctgaatgtgtctcccttttactagccgcgcaaaatgagagcagaactaaaattgaaaaagtctgttcatctatattagaaaaaatgaaaaagagtggcttagttttttacgatgattatactaaaaaatatggaatgacaataaaaggacgtcaattggcagggtttatttattatcatgatacatatgaacgccttttgcgtctttgtagtgatattgagcagtatgtggaatcaaaaaacattacaaatgagattgaatttcaaaaacatttattaagtattgaacttgcaattctatattatatatgttcttttgaggatattttagacaaagggcagttctctcgaaaagagaaaagaatgtatgcaaataaagaattgactctttatttaataaagattgttgagtgcggcgtcgatggttttaaaatggcactgctacctaatatctctcaaattaaagtagatacattagttgaggagcgctttcatgcgttagcaagagctttgatgttatacatttggagtgaagggctttcattgcgcgataatgccttttattcatttgatataagctcaggctctatctcgaaattggctgatttaaccgcatacatactagagggtgttgttcgtctatgtgaaactagtcttgaccctttaatttcacaattcttatctcgaaaactatctgagttttcaggctgtttgcaatatggtgaaactttagagatggtaaaagttcgcaaaacattaaaagtgagccgttcaaaattacgaaaattaaaaagttcaatgataccaagcgatcctgatgattttatcgaatatatcactcgttcaagaaatgacaaattagacgcagatcctcaacttgtagaaaacgcccgaaagtatctgatttcaactaatgaaatgtttgagcttccgtcagttaatgaagaaattttacaaaaatatcttaactcatataatgaacgaggcagaaatatttataaatatcttgcgtatgatacgaaacaggataatcttagcatgttccttgatatgattgattttactatgccttttgatatggatatcaaaattggtaaaactcaagaagaacttcctgaggatgaattttctgaaatatattctgattttttatatcttgatttctcagaggaaagttcatatcgaataatactttattatgatcattggaagcttgatgaggcagacattgagttagaagattttaaatcgtttttggaatttgctaatgccttgaaaattaggtgtgttgttggacccaaattaccacaagattgcattgatttgattaataacactgatattttatatattgataaacatgctttcttgctttcatgcttgtttgactatcgtttgaagaaaaaagttactaaaaaaatatttttaaaatataaaggttatatagttctttcaaaacttaatgctatctataaaaaaggagacaagcaaacaacccctgagaaagatgacttttttatctcatactgttcaaaagataaacagcttgttgaacagattttaaacatattatccaatgcaggttttacctattggtgtgatttaacttcagttaattcggaaaatgacattgatacttacatcacaaaaggctttaaccgcacaaaagctgcattaattattggaaccgcgcaatatttttctgattggaaaagcgaaccatacagaaaaaaggaatttcaagctatagttaataacaataaaatggtaaggatattatgtttaaatacggaagtagaaaacttagacaaactcgggaaagctgcttcttcttcatatgtttctataataaaagttcttcttgattcaaataatatttcaggctttaccagtacacccaattttgaaggagtagttttagaatgaataataaaatgaaacatttagaaatgattcaagatgttataaaacgcatggcatccaactcatttatgctgaaaggatgggctgttacacttgtggcaggaattttcgctttatcaagcaaagactcaaatctattgttttccctgatttcttatatccctattatcatattttggggactggacagctattatttgatgcaagaaagacgttttcgtgcattatacgattttatacgaaagcaagaaaatactaactttaatatgatgttaccatcagaactattaactcagaagatgaaatggcaaaattgctttttttcaataactgaagtactattttatcttcctcttgctttattagtatatttaattattgttattattcaatttcacatataagctttatagcaattattacaaaggacgctcaatttttctgaatcgagcgtggttagccagagaaccgcccgctaatctcgcattacgaaaccagatgttgctcgcaagtgatgttctagtagttgcgtccctcaacagattaggccggatgaagcgcagggaatcacagcggaaaaaaggccggataactgggagttcgcacagtagtgaagcgaaataacggcggttaaggcaatgaatctaaccgaaatgacaaagacaactttttaagtcggctggggaggataagagaaatggaaaaacatcctaaccttaaaaaattcttaaatataatattaggattagtaataatttttttattacttacactagctatcgccgcattacaatatgtgggtgggcttgttgttaagggtatagaagcgttaagtaatattgcaactaaaacagatgctgtaattattgttgccttattaacaggagcagtatcaattgtcggtgtagtaattagttcaatagtagcaaaatcattagaatataaacaaaagacccaaagatacttatatgagaaaagagaagagccgtattctcaattcattgacatggtatataaaatgcaaaagaatgttcgcgaagatggcgaatacacacaggatgaaatgcttaaagatatactaatgttttctcaaaagcttactttgtggggttctagtaaggtagtaaaaaaatggcttgctttttgtactcattcgcaaacaaacaatcttgatgcaactcaaacgttatttgttttagaagatattatatttgaaataaggagtgatatgggactaaaaagacagggattaaagaaaggcgatatgctaaaattttttgttaatgatatagataaatatttacctaaaaaataaaagatagaataaattggataaaaggtataacagcccttttttcatgcacgtgacagggacttcgaatccctccgggcgggccaaaggagacaaacgcataataaaccaagtgtttatatgcgtttgtctttttaaatgaagatagatgtttaagagcagaaacggacaaaaccgttcctgctcttactttatggtttaaacagggggccttgaatcaggttattactgtgagaataaccattccgttgcgtttgccctgcaaaaaggggcgcggcaactgccgcgccccttttttacagtatcctgcccatggaaactgctgttaaaatgaccagtattatgcgatttctttacgcgacttcaatatagaagacggaatcataagcaaattcatagttctgatcccacgccatgccataagccgcctgcaattcgaaaacaacgccctcatctgccggtaggccggtcgcgattaacagggcagcatccttacccccctgctctgcttccgcggggaaccatgcgtcgggaccgagctcagtagcaaccgtagtagcgggagcctgcgtcaagcctttaatgccaagagaaataccagcaagagtttcatccttgtccagggctttccattccttgctgtcgctgcgggtattggcaacgaccggcagcttggtatgtccggtcaaatccttagctttcagggattcaaatttgatggtcagcgcagtagaagcacaggtgttctgtactgtaaaagaggtgggggtaaacgcctcatcataatccttattggcgtcaatgacaaagcgtccggtaatatcgaccgttgcagaaatctgggctgcaatcgcgcgtccgtgtacttcgttgatgtttccgctcgggttggtggtggtccacttctcggccgatacatcaactggctggccgcttgcaacgaccggtgttgacaattcgttgctgttgttggtgatttcatcggcaaaaaccgccggaaccgcgagagcagctaccatgcaggccgccaaacatgctgtaattaattttttcatatgagttcctccttgttatatgtatagatttttatatggaatggcatgggcagtaccgttccatgataaacaaatttaacgcgtgaccatcttgatagctatggtggattttccaatcagctctccagtttccgggtttgtggaataaaaggtcgccaacgctttcactgtaccgacaggcagcttaattaacagggtatcctcttttatatgctgtcccggctgcagggtgggggaacggtagattagctcgccgtcggcttcacgcgtgatttccacataaaaattgttctggttctgaagggaattctcaatttgcagcagataggaatccttccccgcctcgttggacggagaaacgttgatagacatggccagcttatccttatccaccttgtcctgcaggagtttttggatttcttcctgtgtcaaatccttcagagggccgtcaatcacatttgccggcggggtgaagctcggcgcgatagtatctttgatgggattgaacaaaaggatgccggcgactaacaatgtgacaaatcccaaaatccaccagaggatgaagcaattcggccggtagaccctgacaaaatcctcgcggccgtcagcctccatctgaacataccccttttcgctgtaaaacagatgggaaaaggagctggggtcgtaaaccattaaatcattgtcgaattcgtcggacagatagccaatcacttcatccttcttgcgtttcctgtcctttttataaacgccgcctatgagatttttatttcgttctttggtatttttgctgcgttctttctgcatttctttcttttgctttttggagtaaagaggcaggattgtatcgggtgttttttcttcctccggcccgtttttcctgcccttttggagaatatatttgcgcttgggttgtttttcttcctctttttcgtaaaaatccaggcgcgcatgccctaaataagagtaatcctcccggtcgaatttggttggtttaatcttataaatgttcctcaccgccgtttcttattatgatttctcccacgggagcgcgactttccagcctgttacgtcacactggcccttgttgtattgggcaaacccggtataggcggtagccacgaccgtgccgtcctttttgatgccgagggtctgggtccctcctgtcgtaacagcgacaatgtcgctccaatcctgcacctcgcattcgccgtaatattgctccagcgcgccgagatgcttggtagaaactacggtaccgtcctttttcaggccgatggtatgattggcgtctgcggcgatggcgacgatatccttccagccttccacctcgcattgcccgttggtgttgtcgcccacggctactactgtgccgtcgcgcttgagccctaccgtatggatatacccggtggcgatggaaacgatatcgctccattcaccgatatctctctggccggcgtcgcggattttctcctcgtcgagctgggtacacatgagggacccgtccttgcacaggccgacggtatagccttcccctgccgccagctccaccgtatcgtggaaggagagcaccttgaactgcccgtcgccgtatatggaatcacccttgggcgtattggcgacgacctttccgtcagatttcatggcggcggtatagtagcgtccggttacgatatgggtaatatccgtaaaatccttcaggtcgcattggccgaaatcctggctttccaccccggtataaggggtcacagccacagtcccatccgcttttacacccactgtgtggctgtacccggctgcgatttcccggatgccggagaacgattgtacttctccctgcccatcgtaggttgcgttttcgtccgatgcaaaccgcgtggcgccgaccgttccgtcgggctttacataggcggaatgcagcacgcctgccgccaccaggttcggcagcttgatttgctggtaagcagcggcatagtccgtcccggtgtaatgcttcatcagaaggtccagtgcggtcaggtagtcgcctgactgcttgaggtttttacaggcagtcaggattttttccgcactgtccgcctgctccgggcacatgcccagcagttccacgcattgcttccactgctttgcctcaaagagcctgctgccgcaatcataaattttatcttcaatcccgtcatggtcggtaaaggagagcagcttttgcccggccgtgtaataatcgccctggccgtaggctgcttcatagtcgtttaccgcgttggaataggaaatggcgggaacggcgtattcgaccagatagtacccgccgacggcggcaaccaggacagccgccaggctgacagaggtgataatccccgcgcgcttatacgcctttttccgctggacgcggtattcctccagctgcacgcgctgtatttcccgctcctgccgggaggattcccggtccttctcccgccgcagcgcggcggcctgctgttgctgttcttgagtttccttgactgcttccataaacatctcctcagctcacccggtagacgagcatataggttacttttttactcttgtcggaggactggacggtaatctgtaccatattgttgccggtttttacacttgcgctcaggtatttgagctgtacggccgcctgcgggtcctccgttatcacatcgattttcggctgctcggtaatccgccccacatccaccaggatggacccggcagcggggagtacggcctgcacaccgccgaccgtcaccgatttcagcgccgtattgccgctggtacccgtgggggggagcggtacgtttgaaagcgtctggtaacggatgcagagggtgtaccttacctgtttggactggtcggaggacttgacggtgatggttgtcaggttgttccccggtttgatgggcaggcttgcggtataggtaaccgtcgctttggaatcctccgcttccgccttgagcgtggcggccgaccggctgtcgttcaaaattatattgataatcttggccgggtcgtttgtcagcccggcggctgtgccgttgaccgtcaggctctttaaattggtattgtcgctcagctgcgcgccgggaacgccggcgcccttgaccaccttgaccgtgatgacgtgctgtaccttcaaaacgccgcggctgtccccgatttttacaacgcagatattattgccgattttcagggctttgttgcttaaggaatcggacagcacctggtcggacgggttggttaaggtatatgtaaaccgggaacccatctgcgcgtcgctgatggtgacgatagaattggtgctctggggatcgaaatcctcacacagttccccgtccaggtacagcgccttgatgccctcgattagcttgggcttgttgaccttgaccgtatagacggtcgtgctgctcttatcctcagagacacaggtgatggttaccacattgattccttccacagggctgtcgggcttttgcaccgtgtaactggcgcccggatgggacatggcagccgtcaccgtcagctcgtccgtatcggcgcggatttccgcctcataggacagggtggatttatcgaagtgctcaatagccttgccgtttatggtgattccggtcagggtggaaagggtctccaccggcggcgcgaccaccgtatatttcacagtactgctggtaatttcagaattgtcctccaaatttacgaccacatacgttacctcgtattcgcccggttcgttgcccagcagcttcaccgcgcgattgaatttctggttataaaaaagctgaaagctcccctcgttattccagagctttccgacctccacggcatactctgtgccgctggacgtgagcgatttgagggtcagcccgtttgttacgccctggggctgcgtgattgcagtaaccttgattccggcattggcgtaacccaaataacttattttatcgggggtaatccatatcagtctatcggactccacgccctgcgtaagggtgtcggtaggcgtatcgatataataagaggtgtgtgtttcttcatagaccggctcgccggttggttcgtttccccttatttcacccagtggggtgataaggctgggcttttggcagaaaatcgtgccgttgttttcgaccacaccgtctgcatagtttaatagatgggcgtttccggagcctccgccgccaatttggagtgtcgcatccgggctgacggtgatggtgctgtaattgaatatccgggcgtcaccggggccgccgctgccgatttggagcatcccgtccggcttgacggtaatgctgccgaaggtatagttatgcagcagcgcatctccagaggtttggttatcgatttgaagcaccccgttagattcgatgttgagcgcgcccttgttgtacaggtaggcagtcctatcgcctccattgccgacttgaagctttgcgtccggattgatggtgatgacgccggtggtttggttggtaaacgctcctccgggcttattttccgaaccgtcagttgcaatgacgacggaggggtcgtctatcacaagcgtgccgtaattactgattctttgatccatgcgaaaaggcgccgagagcgtaagctgcgcccctttttcaatggtggtgttccgggtttcggacatatattgcttctctgtttccgtcatggtaaagctgccgccccgaacaatctgttcgccctcttttcctgcaaccaatgcagaatcggtgttgcaccagacgcccttggtgaaggtgtagtgtgactccgcgtcacgaatttttccgtacacgaagcaatcgccgttgatggttatatgcccacagttgtcgtcctttatatggccggaagacagataaccatatacccggccgccgaggatatcgattttccggcagcaggcgctaaatccgccgccgataataccaccctcgtcattgattccatcaacgccgtccatgcagtatagctctccgcccatcacatgaaagctgccgcccttctcgtaggcgtctccgccgatagaagacgcgtctttaccggtggtcatattgtccggcttggatttgagagacagcttgcccggaccgtatatatacagctcgacccccgatggtacatggattaggctcttttgagcccttagggtcccacccagcggaggctccggctcgctcatatcttgattgttcgccagcaggttatctgtacctaacatacggagcttgttgccgcttccggtaaagctgatgatgtttttatcctccagaagcgaaatcctgatgccgtttagggtcaggtccacaccgctggccacacagttgattgttacatggttataggcatagacagcgctttggacctcgggggagagggtgacaggttcgctggtgtttatagtgatttctatactcgttctgggaatcacatattcaccgccggatgtaatcggcccgctcacataggtccctccagcggccgatacggtcataccgggcaggaaaagcgtgggcaccagcccgcaggcaagcaaaacgctgagcatctttttcaggattgataaaccttttctgttttgtttcataatctcatccctcattcacattaatagggtattgaaccggcggcgcggcgtcggtgcttggagccggttggccgcttctgtcccgcagcaggctttccctgcgccggttatagtcaggagcggctataaccaatcccctctcttgcgcggggcataccctttgaaaagctgtttgctggtaaaattataaataaaaaacgcagaaaaagcgtatcactcgcgtgaaatgtagctttttctgcgtgaaatgttattttttctgtgcaagatgcaataaaaaggatgcttaccccttcaattagaaaacatattcaagataagccgttttcaatgcgggataggtcccgcgggcgaccgggatgcgcttacctcccgtcagcagcaattccgaagaagtcagcccgctcacatagttcaggttcacaatataggccctgtgcgggataaagaagcagcggtaatcccgcagctgttcaaaaaggaaagagagggtgctcggggtctcgacagccgtgccgtccgccagcgtgcacaaacggcggtggttgaagctttctatcgacaccagttcccggatatggaccttgcggagcccttcttttgttttcagcatcagcgaagggttttcctttggcgcgagattccggatacaggatagaaccgcatcgtcaaaatcggatttttttaacggctttaacaggtaatccgaagcctttaccgaaaaagcgtccagcgcgtactcccgggaagtcgtcaaaaacataatttccgccgtttctccccgcgcccgtattcgcttcgccgtctctatcccggtcagatggggcatgacgatatcgagcaagtacaaatcgaagccgcccgaccgggcaatataatcgagtaaatcgcagggggaaccgaacgcctggatttgaatgggcagctccggatgctccctggaaaacaggtctgccagccgccggatttctataatatccagctccttatcgtcgcagatacatactttgagcaaatgggtcacctcgcttttgcctgaatgccgccaattaacggcggctgccgtaatatgccgtctaacgccgcggcgggcaggatgaactccggcataccggcgctgcccggcgccacctcgtattcgtcgaacacgattaccagctggccctgtccgtttatgtagaaattctggtccgggccaatctccttgaagcagctttcctccggccagatgccgccggggataaagtagtcggccaaaccggcgtttatctgctcttccatctgccttaatatctccgtgctgattataccgatatagtcgctgccgtccacgaacaaatcgcccagctccagtaccttaccggtttgtttatccagtgtaaagcagcggctgtactgtccggagcctccggcgttcagggtggcgttgaagcggatagagagcagtgcgtcgtcgttccggatggtatcgtaggtgatatccatccccacatacccatgatatttccgcgccgcataccatatgaatttcctctgcatttcctggatgtattcttccatctgccggttgatatcgtcgattccatcggagatatccggcggccctgccagctccttatcaggctgtgtgggggaagggccggttggttttggtacgattggaagagcgggggcggtatctgcgttttcattgctgtcccatgaaatcgtgccggaatcagcggaaagcttcgattgctccggcgcggtatccgcctgttttgtttttgctggttctgtttccgccggggcagccggctttgtctgcggctctgtttccggctgggccgccggcatggttggtgctgttcccacatcgtttgggtcgggcgtgttgtccggattgtttgtcaattccacctgcggcagtgcggcatggaacgccgtgcctccccattggaaatcataagaccagagatttacaacccgaaccagcgctccaagccccggtatcccttccatggcctgcgccatggccggcatacagttgattaggaagaaaagagcaaatatggacagcgccgccgccgcagccttttttttcggctcggcttttttctttgcgggcgggggcgtcccctgtgaatcaaagagcaccaccctcagccaaaattggccctctttacattcgcaatgaaacagcccgttatattttttggcaattgcggcaatgcttttcagtccgacgccgtgcccctttcgttttgggacaatcgggaacccgtccgcgtcaaactcaatttgggcgtcgcagggattgacaacagaaacaatcattttccggttgtctgaaaaatccgcggtaatatggatacgccgcttttctttttctgcagtttgctcacaggcgtgaactgcgttttccagcgcgttggccaggataacgcacacatccatttcatcaaagggaatttgggcggggatatgtactgagctcgttaccgtacagccggactccttcgcagcccgcccgatgcacgaggacagcacagcgtttaccgtgatgttctcacaataattttcctgtgagatttcggaaagctggccggaaagcccgccgatataccgcagaagctcctcattgttatctttgccggcaagcccctccaaaaccttgaggtggtggcgcatatcatgccggtaggtacgccccagctccatttttttgcggacgtcctcgtattccctgcgttggatttcgagctgtgccgctaccgctttttccgattcctgtatacgccggacagacgcagccgataccagcgcccgcgccataaccagaaatatcgacagggtcgtcagggatatcaatatccataccgttaaatttgtggtagtgcttataaaataggaaaagagcagaaaaatcatggagacagggaagcaaagcagcagccagctggtacggttatgcagaacataagcgcgaaacggcttgcgtaaatatcggtaaactatcagtaaaagcagggcggcaatgaacagcaggcatcctgtctggataaggctgtgctgcaagggggaaatgctttccggcctttggaaatatcgaacggacagcttttgtaaaaacgtaagcgtacaggaaaccagcattcccgtcgtccagacggcggcagtttggtaaaagcccgcgccggacagaatatgtataccgataacggctggcagatacgctgtcagcggcagcagggtaaggagcagcatcttatcctgcccggatagaagcagccccgcctgcagcgcgccaattccgagcaggaaaccggccgccgcaaggaaattcccccttctgccgaaccgcccttccaacagtcccgcgcaggccagcaaaaaagcaataaaggtaatcccttcccacaggaagggctgtatttcaattatatgcaaccctcgtctctcctttccaccggcaaaacagccgctgttgtttcttataccacaaaaacagggacactctattctgttccgccgctctggcattttaattctgccattacttttgagcgctccagcaattatccatggaaattatacgcatatgcccgcgcccgctgagcactatgaataatttcattatattggattatgcgaatcaaatcaagtaaccctgaaaattgtcggaaggcccattttaggattgtcaaacatgatggacaggataagcaaaaatagttacggcagaaaaaggttcttcataaggcagtatcatcgcacgaagtgcggcatcattgcccgaaagggcaaacatcattcgaaaaaaggctattttgcagaatgagaattgtcaaggggtgaaatgatattttctgttctttggacgaggccgggggcgcgggggcagagccaccgtaagacctaacgaatgccagcgtgttagtggagccggttttgccgtagaatggagcggacggaaatgcaattcattttttcaaaaagcattcttgacttttccgaaaaaaatatgttagtattattaagttggacagctaagtgcgtagaattcctaacggattctacgcactatttttttgcccttcgtagtttttaggtagcttttctctgataaagactccaaaacatgtatgccatatatttaggaggaaaatcatggaacaaacaaatcaaaaccgtatgcttggtgaggagaagatttctaagctgctgataaaattttcaattccctgcatactctcgctactcatcagcgcactctacaacattgttgaccaaatttttgtcggcaacagtgagttagggtatctcggcaacgcggctacgggcattgtctttccaattcttattatcgcacaagcctttgcctggtgtgtcggtgatggcagcgccgcctatcttagcatttgtcaaggaaaaaaagatacccaaaatgcacaccattgtattggcacaggcattacgattacgctgatacttagcgttatcatgctggcgctctgtgcggtgtggaaagagccgccgctccggttattcggtgcatctgaccagacgattggaatggcaatagagtacttcgccattgtactttgcttctttccggcattcatgctaatgaacatgatgaatgccgtcattcgtgcagatggaagcccggcgatttcaatggcatctatgtcactgggcgcaattttgaatatcattattgacccaatatttatctttgtgctaaattggggcattgcaggtgcagcatgggcaacggttattggacagacagtttcttttcttgtttgtgtgctgtactttttcaaaacaaagagtttccggctgacaagggatagctttgtaccacatttcaaaattttcagtaacgccttgaaattaggtgcatcttcgtttatcacacagatgtctatcgttgtcatttccttagtctgtaatatcatgctcgccaaatatggggctttatcaatttatggacaggatattcctatctcagttatcagcattgaaacaaaggtgtttaccattgttatcaacatcattgtcggcattgtccttggcggacagccgatattaggctataattatggcgcaaagaaatataatcgtgttaaggaaacataccgaacaattttaattgcaacgcttgttgtcggcattgtgtccactttaatttttgaaatttgcccgcaagttgtcatcaatatttttggctctggaaatgatatgctctatcttgaatacgcaatgcgcacattccgaattttcctgtcgctcgtcatctttacttgtgtgattaaaatgtcctctatcttctttcaggctgtgggcaagccagtgatggcggtcattgcgtctttgacgcgcgatattgtctgctttgtaccgcttgtgatactaataccatctatctttgaaaggaatcaagctagtagtggtattaatggaatcctgtttgccgcgcctacggcagatattatcggcatgattgttgccgtgtgcttaaccgtacactattttagaacgatggaatccagtgagaacctggaaccggtcccagagaatgcggtaatccggcgttaaagaggtcgtttgaatatgtagtcgcgtcaacctcgtttctgcctgtgattgcctactatctgcacaaaattgaggattgggctttgtgtttcagcgttgtaaggtctgcggcagggacttcgttgcccgtagccgacactatgaattgtgttcggacgggtgccgcaagaaacaggcggcagaagccaaacgcgaatttgacgagagggcaaagggaaacaggttggaacagctttatgacgcggcgtattattactggtataaccgtctgcggaagttaagacgcgaaaaggccgccaatcccgaaaaggcggcggctgtgggtgaagcgttcaaggcgttccgaaaagaagcggtcaagcgcaagggagaggtcaagtgtggaaaaatgaagctgaacgatttttcctcttggctcatagaacaacaaaacgagtttgaccgattgatggacggttgataaaatagggggtggttttcgggcacggtacagcccctaaaacgcccctgtatgctttttgggggtaggcaagggatttataccgcccatgcctactttgaggttttaagcgtgacaagaagccagtatttatgcgggtttgagggctgtcaaaaacttctaaatgtccatgcccgtctgttacgcattagccgccttgcggcttcgtatcacctccttgtgcaatcgcgtcaattcactgcaaatgagccgccgccttgctgttttagtgtagtatcattactaccctttacagcatacattccagtgtagtaaaatctttccttccctccttactgcccaatacgtatgtaatcctacactctgaaagtatagccagcaaacggaaaggatttatcgcctgcagcgcgcctggcttcatttttttattgtaatgctgtataatggcagcaaagtgaaaaaacggggtaaagcaatggaatacaaattgactacaggaaatataagccgttctctggttgttttcagcctgcccatgattcttggcaatttattgcagcaattatataatgtggcggatacgctgattgtcggaaaaacggttggtccggcggcgctttcggccgttggttcctcttacgcgctgatggtattgctgacctctgttatcctggggctttgtatgggaagcggcgtggtattcgcgcggctttatggggcgggaaggacagacgatatgaaaacaagcgtatttaatgcctttatctttatattgttggttggtgccgctgtcaatattgcttcttacctgcttctcgaccagtttatccaatggcttcatgtaccagcccaggccgttgcatatacccggacctatttgcggattatatttgccggcatgacctttgtatctttatataacttttttgcttctgtcctgaggagcgccggcaatacggtcgttcccctggttttcctggctgtggcagccgttacaaatattattctcgaccttatttttattttggcctttcatttaggggttgcgggcgcggcgctggcgacaattgcggcgcaggccctctcggcgggttgcatttccggctacacttttgttaaggcaaagcacctttgcccgagcaagcggcatatgcgttttgacaaacgcctgttaaagctgattgccggcaattccgtattaacatccattcagcagtcaattatgaactttggcattttgatggttcagggcctggtcaacagcttcggcttcgcggcatccgccgcttttgccgcggtggtcaaaatcgatgcgtttgcttatatgccggcgcaggatttcggaaatgctttttcaaccttcatcgctcaaaattatggtgcaaaacagccggagcgcattcataagggaacggtgtcggcaattaaaatatcgagcgccttttgcgtattcgcctctgtttgtgtctgcgttttcgcagagccgctgatgcagatgtttgtaaagaaaggcgaggctgaaattatcggcataggaatcgagtaccttcggattgaggggctcttctatatcggtatcggggtgcttttcctgctatacggcctgttccgcggatttggaaagtccggtatttccattgtgctcaccgttatttcattgggaagccgcgtgctgcttgcatatacgttatcggcggttcccgctgtcggcatggttgggatttggtggtcggttccaatcgggtgggcgcttgccgatttggcaggtattcttatttatttcaggtataaaaaacggctgataccgaacccgcggtaaacaattccgtcgggagctgccccagcaacgcgggaaaacagccggtaataccgcgttggtttaaaatcatataatgctcaaaacgccttcaagttctaaattggaaaggacgcaatacaatataatagatagtaggaaagggaggaaccagtttgaattccaccatacatctttttgcgatttccaatgttccgcgccatgtgtcgttttatggctctaattacgcgcggcttgaccggtgtgtgcgcctgagcggatacccgcacgccgtcctcgaaaaaattatttccggcgtatacagccgggcgcaggaggaaaataccccggctgaaatcgtccatcattgcctagataacacaatgcagggcattattcttccgcagcgttcgtgcggcgtgttcggtttcgacacttacgacccggatgagctcaattatttatcgaatgcaagggatggggcgatagcgtccataaaggagaacataaacagggcaagagaaatttttaccaatgcgcgcgcccttcatgacgaacaggaaaaaatttatatcgcacatatggattttgacgctgccgaccgtttgacgaaagaaacaattcatatgctttttgacgggaagggcctggattctcccggaacagaggtacaccgctttttcggcgcggcgactgtggacggcaatgtaaactacattcccgaggtaacaaaggacatcccaaaacggtacttgattaaaggccgcccgggaacgggaaaatcgaccttcctgaaaaaaatagcacaaaccgctgtttcacgcggcttccgaacagaaatctaccattgctcgctcgaccctgacagccttgaccttgtcgcggtccgtgagctggggttctgcctgtttgacagtacggccccgcatgaatactttcccgaacggcccgaggacgaaatcatagatatttacaaaacatgcgtgacgccaggcacggatgaaaaatatcaggccgagctcgataggtcgcagaaggcgtataaagaaatgattgcgtccggcgtttcttttttaaaaaaagccaaggaggaaagcgaccggtatgacgcagcccttccggcaatcgatgaggctgcgctcaaacaggtggtgcagggcatcctgcaaaggctgttttaactttttgcaggttacgcacgctttatcaataaaaggcgcctgccgcaatattgcggcaggcgcctttggtgaacgcttttctataccctgttttgatttacctgtacgaattactccaggatattcccatcagtcgatattgtttttacctgccacggcaggaattttccgcttgcctgaagcgcggattttacggcgttttccagcccgccgcagcacggaacctccattcgcacaaccgtcacgcttttaatttcgttattttttataatttccgtaagcttttcggtataatccactgaatcgagcttcgggcatccaatcagcgtgattttgccgcggataaaggcccggtggaaatccgcaaaggcgtatgcgcagcagtcggccgcaaccagcagatgtgcgtcatggaaatacggcgcgttcgccgggacaagcttaatctgcaccggccactgtcccagctgtgaggataacggctgtgcagcccctgcttctgcgggcgcgtcctttttttcgagcgccttcgcgtgcgtgcccgggtacccgcaggcaagcggttttgcccgcaggcttgctttgacggcggcttcgtcgtacgcggccgcttccctgcttacaaacgtaatggcccccgtggggcatacaggcaggcagtcgcccagcccgtcgcagtaatcgtcgcgcagaagctcagccttaccgccaaccataccgattgcgccctcgtgacaggcctgcgcgcacaggccgcagccgttgcatttgtctttgtcgatttgtatcattttccttatcataatggctcctccttaaaagcagacgtttcttgactttgcgtgcttatcatactataatcagtctcataagtctgttgtatttccaacggagggcaaaggatgcaaaatgatttaagtttaatccacggctctgtcctgtttgccgggacaaccgttcaggagacggaaaaaatgctcacatgcctcagcgcaaaacaggcggtgtatcaaaagaatgaatacatcctgcgcgcgggggataaaaacagctgtgtcatgctgcttttggagggcggcgtttgtatcgtccaggaggatttctggggcaaccggaatattatctctaaaattacgccgggcgaaatatttgcggaggcgtttgcttgtgtgccgggcgcgcgtttgggcgtatccgtcacggcggaaatgaaatcggctgtgctttttctcgacgtacgccgtatccttacggcttgcggcgcgtcctgcccgttccacagcagggtcgtccaaaaccttgcgtcctgcctggcgcagaaaaacctgcgcctgacggaaaaacttacgcatattacacagcgaaccaccagggaaaagctcctgtccttcctgtcggcggaatctataaggcagggggcttccgggttcgatattccgtacaaccggcagcagctggcggactacctttccgtcgaccgcagcgcaatgtcgtgggagctttgcaggctgcgcgacgagggcgttttgcggtttcataaaaaccactttgaattactgttttcgtgaaaaattttgaactccttgttgattttaaaggctatgtagattacttctaccttcaggattgtgtttcttacgattatagcaaggtgcatttttggattggaaacggcgaattcactagtaaacctttgccgcagacagccgaagaatatcgacagtggatagcaaaagagctggagcttgtagaaaggagaaatgcaagaatccaggcagcctgcagtaattgaaccggcataaaacaaatatttttaaaaaagccttgacttggagtgcactccaggtgttatgtttgtatcaggataaaaacaaatttaaaaaggagtgttctttatgagttttcatatgtatgtacctacgcgcgtcctgtttggcgcaggggagcttcacagcctttaccggcagcagctgccgggcaaaaaggcgatgcttttaatctccaacggaaaatccgttaaaacaaacggcgcgcttgcccgtacccaggagcagctagaaaaagcggggatagagtatgcggtattcgataaaatacaggcaaatcccctcaagcagaccattatggagggcggcgcgttcgcgcgtgaaaacggctgtgatttcatcgtcgcgctcggcggcggcagcgtaatggacgccgcaaaggcgattgccgtggttgcaacgagcagcggcgacctttgggactatatctccggaggtaccgggctcggaaaaccgtttgaaagcaagccgcttccgattgtagccatcaccacgacggccggcaccggctccgagaccgattccggcggcgtgattacaaatccggatacgcacgagaaaatcggtttggtaaacgaggcgctcttcccggtgctcgcaatcgtcgacccggagcttatgcgcaccgtcccgccgaagtttacagcctaccagggctttgacgcgctgttccacagcgtggagggctatatttcagccaacgcgaaccttatgagcgatatgtacgcaatcaccgcgatagaaaatatcggccgtaaccttgcgaaggctgtacatgatggcggcgatatggaggcgcgcgagcttgtggctttcggcaacacgctgtccggcgtcgttatgtgtgtcggaaccgtgacgagcgagcattcgctggagcacgcgatgtccgcgtaccatcaggagctgccgcacggcgcggggctgattatgataagcaaggcgtattttgcgcactttatcgaaaagcatgtctgcggcgaacgctttgtccgcatggcaaaggcgcttggcatggaaaacgcggataacccggaggattttatcactgctcttgcaaagctgcaggaggactgcggcgtggcggacttgaagatgtccgattacggcattaccaaagacgagcttgaaacgctcgcccataacgcgatggactctatgggaggcctgttcgagtgcgaccgttcaccgctttcggttgcggactgcgtagcaatctatgaaaaatcctatagataagccggcgttccatagtgccggaattcagttggccatagggggaataaatatggaaatggaaaaaagccttggaccgggcgcggtcttcccgatgggggagaaaaacgaagcgttcgcgcggtattttaccggccagagctatttgaatatgctgacagccgaaggcgttgcaattgggaacgtcacgtttgagccggggtgccgcaacagctggcatatccatcacagcggcgggcaaatccttctggtgacaggcggcaggggctattaccaggcgtggggagaagaggcgaaggagcttcacccgggcgacgtggtaaatataccgccggaggtaaagcattggcatggggccgccaaggacagctggttttcccatcttgcggttgaggttcctgcacagggggcaaaaaacgaatggctggagccggtaccggacgaagcctaccgtaaactgaaataaaagggaggagacggcatgaccatcgcgcaggtcagtaaaaagtatgacatttcagccgataccctccggtattacgagcgtattgggctgattcccacggtaaaccgcctgccttccggcatccgggattatacggaaaacgactgtaattgggtggagtttgccaaatgcatgcgcggcgccggcttgcaggtagaagcgctgattgaatatatcgccctgttccagcagggcgacgggacgattgaggcaagaaagcagattcttatcgagcagcgcggccagcttgtgcagcggattgacgaaatgcaaaggacgcttgaacggctcaataagaaaattgagcgttatgagcaggggctgcttccggcggaaaagaagctgaaggaagagttcgatttaaaataaccccggaaaaggaagccccctgccgctatcttttcgtgagaacgcacaaaataaaggcgttggtctccctcataaattctcccattttgacggtagtttttttcttacggcaaggcggcaaatgcagtataatataaacagcggggaaaagccctgcgtttataattagatgtaagtccagctgggagcagtgcgcagtctattcatggtgaaaaccggaaaggctgcgctttttttgcgctcgttcgggcttcgcttttgctttgaagggagaaaaacaaatgacagaaaccaaaaaagagccaaacgcttaccttgcacagcagcctatcggcaagttgctgcttaaattttccattccctgcgtgctttctatgcttgtaagcgccctgtataatattgtagaccagatttttatcgggcagagtgtcgggtatctcgggaacgccgcgaccaacgtagtatacccgtttaccgttgtggcgctggcgctcgcgcttttaatcggggatggaagcgcggcgcttttgagcctttcgctcggcaggggagacagtgaaacaagccataaatgtatcggcagcgctattgtcatgacggctgttacaggtatactgcttatggcggttggctttgccttgaccgggccaattcttaagctgttcggcgcaacgccggcctgttatagctatgccgtggactatatgcggattattctgctcggcattccattttttgtgtttacctctgggatgaactccgctatccgcgcggacggctcacccggctattccatggcggctaccgtcgccggcgcggtactcaaccttattcttgacccggttgcaatttttgtgtttgatatgggcgtgcagggcgcggcggctgccactgtcatcgggcaggccgtttcctgtgttgtaacagcgctttatttccgtaagccgaaatcgttccattttcagaaaaagagcttccggctgtgcggaaaaacaataaaaactgtctgccagcttggtatatcgagctttatcacgcagaccgcgattgtcattgtaatcagcgttgcgaacaatatgattacagccgttgggccgcagtcgcggtacggcgcggatatcccgctgtccgtcgtgggtattgttatgaaggtgttcggcatagtcatcgcgttttccgtcggcatagcggtgggaggacagccggttatcgggtacaattacggcgcgaaaaattataagcgggtgttccatgcgtaccggcttgtcattctcgcaaaccttgtggtcgggcttgccgcaacgcttctttttgagctttgcccccaggtaattgtaagcctgttcggcagcgaaagcgcgctttataacgaatacgcatgcctatgcttccgcattttcctcggcgggattttgctttgctgtgtgcagaaggcaagcagcatctttttacaggcaatcggcaggcctgtaaaggcgaccattttgtcgctttcgcgcgatgttatatttcttgtcccgggcgttattattttggcctcgtgcttcggcgttaccggtatgctgtgggcggcgccaattgccgacgtgctcgcgtttttgctggccgccgttcttgttgtgctggagtataaaacggttgcgcgcaaagaacaaggaccagaggcggcgcttgtaccggcgcgggactgacccttttgtaaggtttaccggaaggggcaaaacggaaagcaggcgaaagcctgcttttttgcttgtaaaatttaagcttgttttaagtaaagcgtgttatcctgcccttaaaatcaaagggaggatagctttaaaatacctgtaaaagccggatgcatggaataggaggcagattaccatagaacagcttcaggaaatattgaaaagcggcgaaaaaaataacttcttgacgaaaaaagctttcgagtggtaaactggaaattaaaagagcggatgcttccagacgagtacggggaaagcgttatccgcggcctttattcgatacgccggacaggaggcttatccgcgcctcgctcgaaaaacctgtgacagggaaaaggaaatctcggtacgccaaaggcgcgcggggaactataggaaatgcaaaggaaatagggagtacaatgaaaaaaagaattgccggattcattttagttttattaagctgcgcgctgctcttaccggggtgcgggcagacgccggaggacctgccgtcggatattccgccgggtacgcagccggcaaagcagccggaaagccatctgatagatgggtttgagataatcctgcaaaccccggagcttccgacaggctgtgaaatcaccgccttgacgatggcgctgcgttattacggatttgatgcggataaagccacgatggcttccgcgtacctgccctgcatgcccgcaaaccagtataccggggaggacggcaggctctatggcagcgacctgaaccagtactttattggcgatcccttcagcgtgtcgggcattgtttgcggcacgggagccattgtgaccgccgcagacgcatacctcggcggctgcggcagcaaaatgagggctgaggatttaacgggagcgtccccggaagagctttatcagcttgtagagcaggatatcccagtgctcgtatgggtgacgattggaatgcagcaaagcaggggcgatttagagggctggtatacagaaaacggcgattatgtagaatggggcccaaacgaccatggtgcggtattgattggttttacagatgataccgtcgtgatagcagacccgctctatgggcaaatggagtacagccgcgaggcgtttgaagaagcttttgcgtcaagaaaccatcaatgcgtcgttttgcgctgaacggctccggcggaaatatgcaggcaccattttcatatatgctctccttcttacacgacaaaaggaaccgggcaaccggttccttttgtcataaggggttgggggacaaattgattgaaggatacaggaggctgctttattttttcaatcatgataaccggctgtgcaatagtaagcacgtcgtctgttacggcctggcgcgcagctcaaaatttgcggcctgataatgaatttacacgtaatccggtataagccggagtacacgcgctatgcgtcaccacgcttccgtcgggcatgggggcgccgtaggacatgggggcgccgtaggacatgggggcgccgggcatggtgcgcatccgcactggcagggcagacagggagtggtaatctgtaaatccttacagttatatacgtttgtatggagtccaatcaaaacaagttttctcctttcattaaaacggcacaaatattcgttgccgccgggacaacccggcttatcctatcatatgcgtaccgtcccgcaatggtgaatgcctgtccgcaaggcacaaaagtattgcgtttttcccccacacgttttaaaataaaaatagaaaatatgttctgctttgttctgataagcaaaagggggaacgggtatgattctttcggcctccagaaggacagacattccatgctggtattccgattggtttataaacaggctgaaagcgggctttgcccttgtgcgcaatcctgtgaacgcaaagcaaatcagccaaattgcgctttcgccggaaaaggtggactgtattgtattttggacgaaggatttccaaaatatgatggacaagcttccgcttcttgacgaaatgggctaccgctattatgtacagttcacggtcacgccatatggccattcggtagagacggctttaaggccgaaagaggatatcctccggacgtttgaagctttaagcaaaaaaatcgggcggcgccgcgtgctttggcggtacgacccgattctcctgactgatttatatgatgccgcttaccacaaaaagcaatttgaagggctttgcaggcgcctttgcgccagtacggaaagcgtaacggtgagctttgtcgatttttatcaaaagcaggggataaagcagccgtaccgtgcgccggacgaaggggaaacggcggagctttcccaatcgcttgcgcatacggcgaggcgttatggcatgataccaaaggcctgctgcgagcggccggagctttcggcatacggtatagaaaaggcaagctgtatcgacaaagcggtgattgagcgtatctgcggggcaaagctcaggctcggctccgacaaaaaccagcgccccggctgcggctgctgtgaaagcatagacatcggcttatacggcacctgccagaacggctgtatttactgctacgcaaaccgcggcgctgaggccgcccgtcgccgttttatggagcacgacccgcacggcgcgctgctttatgggaaggtacaggacggggacgttataaaagaccgcgcggtacagtcctgcctgcaagaccagctgagcctgtttgaataaggaagaaggagcgggagatactcccgccccgtattttactccgcctgcgtttccggcaaaggctctatttttttcaggatattaccggtaagcacagcgataacaaggcttgctatacaggccaaaaacaagatgatgctggaaccgcctccgaaccggtcaaaaagaaaaccgtacatcgcctgcccggcgggcagggcgcaaatactcattaccgtaatcagggaagcaaccttgccgagcaggtgcccgggcgttacgcgctgggcaaacgtctgcgcgaaaatggtaaacagcgcggcgcagcacatacacgcgataacgctcagcaggatgacggcataagacacaaacggcgcgccgggtgaaatgaccgccaggccaatgggcagcagcgcaaggccggcaatcagcagcagcttatgtgattttaggaaatccacctttttggcgacaagcccggcaaggcatccgccaagaatcgacccgacggcgagcgcgccctccgcaaaaccgtatagctggctcgacaggccgagatatattttaattaaatagggcaggcccaccatgataagggccgacaagaacaggttcagcgccgcgacaatgccaagcagcttaaacagctgcgggttgtcatgcgtcaggaagcgcagcgcgccggataaatcctcccgggcagtacgcaggattttcccgcttttttccctgcgttcaaacgggatacgcaaaaacagctccatcacagcggataaaaagaagcagacgccgctgataaagagaatcgtgtcgatgtggagaaagccgtaaagaaagccgccgataatcgggccgagcaggttcgacagtgcgttcacctgcacgaccgttccattggcgcccgccaggtttttatcgctcgtcagcgcgggaatgctcgcctggacggagggctggtagaacgactggataacagaaagaagcaccatcgccgccccgattggcaggaggctttcggaattcacaaagaacagcgcgaaaacggcaatgacggctgccgtcgtaaaatcgagtatcaccatgatgttccgcttgttcacacggtctgcaagcagcccgccgaacggggaaagcagcacggtcggaatcatagagacagcgagaatcccgccgaacgctgccgccgagccggtctggtcaagcacaaaaagcgacagggaaaaccgcaggatagaattgccgaacagcgaaacgatttgcccgataatcatcagcgtaaaatcgcggtggaacagtttttcttttttcataaataagactcctttgaggtttaataccgacggttggtatgtatatatgttaaaagaaacgcccgtatgggcgaatcttattctatttcttctttgttttccttttcctgtatccattcacggcggttaaccgcgtcgtaataatcggacgcgacctgtaaaaaatagctgtcaatcaacgggatgcctatccggtcgagtacctgctggtaaaagcgtactttatcgataaagcgttccttttccacagggaagatggccgggttaatccaaatgttcatcagtacgagcagcgtctccgaggcttcacgcgggtactgcgtatgtatggagccatcacggttgccctcttctatcagacaggcgatttcaggtgcgatttcctctaccgcgcattgaagggattccaaaatcatgcgcgcgttgtaacggtaaacaggggcggtcacagcgtcgagcgctaccttcttttcattttgcagctcatatagaaacaggcgagacagcttttccaaagcggtaatgcccggtatatttttaacctccgtaaaaatgtccgccccttcatagataccttcgcaaagacggttgagaatttcttccttgcttttgaagtggtggtaaatcgcgcccttggacataccgattttgtctacaatatcctgtatcgaggttttctcgtacccctgctgcgtaaacagctgataggagacctccaggattttctgcacggtttcttccggatatttgttgcgcgacacagcgtccacttctttcatacatacggttggtatgtatagaatatagcacgggcgcaaacggctgtcaagacaaattttgaataaagcggcgtgataccgccccagttgttgacagaaaggggcggcaggcgtaaacttaaatgaatcagttgtttttcggcgggttacacagcccggcatagatgagggggaggacgccatgcgcctggtacaaatttatttcagccccacgggaggcgcaaaaaaggtgctcggtatcatcagcagtgtgtgggactgtgagaaaacagaggtcgatttatcaaacccaaacagggatttttccaatattatgctgggggaaagcgatttgtgcctcattgccgtcccaagctttggcgggcgcgtgcctgaaattgcgctttccaggctcagggagataaagggaaacggcgcgtccgcggttttgattgccgtctacggcaaccgcgccatcgacgatacgctgcttgagctcaaggatacccttgttcctcttggattctgctgtatcgcggcggtttcggctgtcgcggagcattccatcatgcgctgttatggtacgggccggcccgacaaagaagatgagcgggagctgcttgcgttcgcgcggagcatcagggaggctgccgggcgcgtcaatcccggacagggccttgccgtccccggcggctttccttaccgggaatataacggcgtgcctttccgtccgaaatcctcaaaggcctgtacccgctgcgggctgtgcgcgcgggaatgtccggtaaaagctatcccggaggacgacccgtccagtacgtttgaagataagtgcatttcctgtatgcggtgtatcgcggtttgcccgcggcaagcgtggtcgctgaataaggcggcgctcttcgccgcgtcgcggaagatgaaaggggcgtgcgcgggcagaaaggaaaataagctgtttttgtaaccggctgtttggaaggggtgcgtatcatgacaaaacaggtagccgccgccattatcaggaaggacggtaaaattttaatctgccgccgcgcggcgggcggaagctgcgcgaacctttgggaattccccggcggaaaactcgaaaaaggggaaaccctgcgggaatgccttgcgcgcgaatgtatggaggagctgggtacatcggtcaaggtgggccgcctttatgaaaaggcatgccatacctatccggaggccacggtggagctttccttttttcttgcggagataacaggcgggacgctccaaaagcatgtgcataccgattgccgttgggtaacgcaggaggagctttcccagtatgaattctgtccggcggacagtgcgctggtcaggcgcatacggcaagacggcaaactgttttagtaggccgccgtactgtccggacaaacggcgataggaggagaagccatgaccataatcgaagcggctgaacgccgtcatacggtgcgtcaatatacgggccgcaggataccgaaggatatagttgagcagcttgcggcgaaaatcaatcaaaataacagaaaatacaatctgaagatgaagctggcgctggaaaatacagaagcgtttggcgcagtcaccaggcttattttagcgaagggcgtccgtaattacatcgtattagccggggagaatacgccagatgttgatgaaaggctcgggtactgtggtgcggacgtcatgctgcttgcgcaggcgcttgggttgaattcctggtgggccggcggttccttcagcagaaaaggcgccagaaagaatgccggcgcggcaaaagcggataaggtcgccggtatcattgccgtcgggtacggcgctgtccagggagccgcgcataaatccaaaaaaccagaggaagtcagccgttatattggaaccgcgcctgagtggtttataaaaggggtggagacggcgctgcttgccccgacggcgcttaacaaacaggcgttcctgataaaaggcgccggcagcagggtgtcgctcatttgcagtaacggtgcattctccggcatagagcttggaattataaaatttcattttgaagctggcgctggcaaagaaaacttcgaatgggtttagctgccgggctggggacgcgcggcgtttcacaaaaataaaaaaatagaatggagataaattatggttacgaatcataacatagacaacggaaaagccttcgactggggaaagacctctgccgattacgcaaaataccgcgatatttatccaggcgagttctacgaaaaaatccggaaaaggggtttatgtgaggcgggcatggacgtgctcgacctcggcaccggaacaggcgtgctgccgcgcgcactttacgggtccggcgcgcgttttaccggcactgacctttcggaaaaccaggtgcttgaggcgaagaagctggctggggaacagcagatggacatccgctttttggcttctcccgcggaagaactgccctttgcggacaattccttcgataccgtaacggcgtgccagtgcttcttttattttgaccgtaagcgggtataccccgaaatctctcgcgtactaaggccgggcggcaggctttgcgtcctctatatggcctggctgccggaagaggataaaatcgcgggcgaaagcgaagcgcttgtgctccaatacaatcccgattggtcgggaaagggggagcgccgccatccgcttgcttttgagcctgaggcaagcccttactttgaacaggagcattccgaggtgttcgacctccaggtacccttcacacgggaaagctggaacgggcgcatgaaggcgtgcaggggaatcggcgcgtccctgagcgaagagcgggtgagcgcgtttgaccggcagcatatggaactgctttcaaaaattgcgccggagcgctttaccatacgccattacgccgccatgcttgttttaaagagcacgaaacacggcagcgctgaatgaaggcagccgtcaggaatccattcaggcaatgtatttattgctgaattgggtggaaagtgtgacagggaatgaaaacgatttataaaacaaaaagcgggaaagccgctgtactgaagctgtatgatgaacagttatctaagctcggctgccaataccgggatatttttgtcaaaacctcattcggggaaacgcacctggttgaaacaggaaacacggaaggccccgctctattggtctttcacggggggaactccacaaccgcgtatcatcttttaatgtgtaaattcctgcttcaggattttcacatatatgcggtcgatacgattgggcatccgggaaaaagcgcacaaacctgcctttcccctaggggctatagctacgggcgctgggcgggcgaggtcatagaagggctcggctttgagaaaatcagatgcttcggaggctcgtttggcgcaggcgtattggcaaagctcatgtgcaccgcgccggaaaaggttataaaaagcgtattgacggtgccgtccggtatcaacaacgcttttccaaccggctccgtcaaaatgatggttccgctgattaaatactgctttacaaaggatgaccggtacattgagcaggcggcgcttattatggcaatcacgcgggatgtattggatgaagacacctttgaaacggtaaaaagcagcttttcctatgtgaaaacaaaggtggggatgccctcaaatgtcagtaaggaaaggatggggaaatgcggcgctccggttcttgttatggcgagtgagcttgactgcttgttcccggcgggaaaggtcttaaagcgggcgcggcaaatcattccaaactgcaccctgtatgagctcgtcgggcgggggcatatgcacatactcacagaaaaagaaaagaatatggtaatccagtttttaaagtgaaataagcttatcttcaagcttatatgccattatacaggagttgtcagcatgaaaatgccggaaacgatagaaccagggatgtttgccccctgtgggatgaactgcaaggtttgctataagcattgctcccataataaaccgtgcggcggctgccttagcagcggtttgggaaagccggggcattgccgcagctgtaaaatcaaggattgtatgagggaaaagggttgtgcttactgctatgaatgcggcgattacccttgtaagcggataaaaggcttggaaaaaagctatcaaacgcgttacaacgcaagccttatcgaaaacagccggcttgtcagggagcaagggattgaggcatttatgcagctgcagaaagaaaaatatacctgcccgaaatgctcatgtacggtaaggaagcaagcaaccgaaaacaagagatagaccgccagcactacactattccgaaccaaagaccaaaagataagcattgtgggaaaatctaaacttttggattttcctacaatgccaactacggcggaatccctcccactccttatatctttctgtatacattgaatttgtatttagtaaaatgcagacaacaccacggatcggcttttggttggacaattccaaccaaacaccacagcagacagcagaaaacattctgaacgctaggaagccggtatgattgttacatataaggggaagaaaaatttcttttaggtacttgctttcctaaaactgatgtgatacaatgatttaatccagaaaaggagtaaaaaatatgcggcaaggtattcttaaataaaactataatcaaatagtgggaacaaaggattatgatagctccttttgtaggggcttagttttttgtacccaatttaagaatacttttgccttatcaattttgacatatccccaaaaacagcaatcacaaacaggtgtatgctgtatatgtgtatgtccgcaacttataatccccagtggtaaaagtattttactgctggggatttttatgccctttggggctgtaaagggaggacaatcacatgaaaataatcaatattggaattcttgcccatgtagacgctggaaagacgaccttgacggagagcctgctatatgccagcggagccatttcagaaccggggagcgtcgaaaaagggacaacgaggacggacaccatgtttttggagcggcagcgtgggattaccattcaagcggcagtcacttccttccagtggcacagatgtaaagttaacattgtggatacgcccggccacatggattttttggcggaggtgtaccgctctttggctgttttagatggggccatcttggtgatctccgctaaagatggcgtgcaggcccagacccgtattctgttccatgccctgcggaaaatgaacattcccaccgttatctttatcaacaagatcgaccaggctggcgttgatttgcagagcgtggttcagtctgttcgggataagctctccgccgatattatcatcaagcagacggtgtcgctgtccccggaaatagtcctggaggaaaataccgacatagaagcatgggatgcggtcatcgaaaataacgatgaattattggaaaagtatatcgcaggagaaccaatcagccgggaaaaacttgcgcgggaggaacagcagcgggttcaagacgcctccctgttcccagtctatcatggcagcgccaaaaatggccttggcattcaaccgttgatggatgcggtgacagggctgttccaaccgattggggaacaggggggcgccgccctatgcggcagcgttttcaaggttgagtacaccgattgcggccagcggcgtgtctatctacggttatacagcggaacgctgcgcctgcgggatacggtggccctggccgggagagaaaagctgaaaatcacagagatgcgtattccatccaaaggggaaattgttcggacagacaccgcttatcagggtgaaattgttatccttcccagcgacagcgtgaggttaaacgatgtattaggggaccaaacccggctccctcgtaaaaggtggcgcgaggaccccctccccatgctgcggacgacgattgcgccgaaaacggcagcgcaaagagaacggctgctggacgctcttacgcaacttgcggatactgacccgcttttgcgttgcgaagtggattccatcacccatgagatcattctttcttttttgggccgggtgcagttggaggttgtttccgctttgctgtcggaaaaatacaagcttgaaacagtggtaaaggaaccctccgtcatttatatggagcggccgctcaaagcagccagccacaccatccatatcgaggtgccgcccaacccgttttgggcatccataggactgtctgttacaccactctcgcttggctccggtgtacaatacgagagccgggtttcgctgggatacttgaaccagagttttcaaaacgctgtcagggatggtatccgttacgggctggagcagggcttgttcggctggaacgtaacggactgtaagatttgctttgaatacgggctttattacagtccggtcagcacgccggcggacttccgctcattggccccgattgtattggaacaggcattgaaggaatcggggacgcagctgctggaaccttatctctccttcatcctctatgcgccccaggaatacctttccagggcttatcatgatgcaccgaaatactgtgccaccatcgaaacggcccaggtaaaaaaggatgaagttgtctttactggcgagattcccgcccgctgtatacaggcataccgtactgatctggccttttacaccaacgggcggagcgtatgccttacagagctgaaaggatatcaggccgctgtcggtcagccggtcatccagccccgccgtccaaacagccgcctggacaaggtgcgccatatgtttcagaaggtaatgtaaagatacataatcgtcaagacggcaacaatcagaagttatggagggtaacaatggaatatagtaaggaagatttaatggaagcaaaaaagcaaatttggggagtgggagagaacatgggaacagaggaaagtaaaaaaatctgggaggagaacgcacaattttgggataatgcaatgggtgacgaatctaatgaatttcacagagaggtagtgcgtcccaaagtaacggaacttctatctcctaatcctgcggattacattttggatattgcgtgtggcaatggaaattattcttcgtatcttgcacaaagaggcgcttcggttgtcgcttttgattacagcaaaaaaatgatagaattggctaaaagacggcaatcacaatatgcaaaacaaattgaattttgtgtggcggatgcgaccgatagaaaaagtatattagaattaaaaagaaatcgagcctttacgaaagcagtttctaatatggcaattatggatattacggatattgaaccacttcttatggctgtttatgaactgttgcaggaaagcggaatttttgtctttgcaacgcaacacccttgttttgtcacgttgactgaaaaatatatgacaccgcacagttactatgatatagcgattgaagggcaaccgaaagagcagatttattatcatcgttccatacaagatatttttaacctttgttttagagctggatttgtcattgatggattttatgaagaatgttttaaaaccaacaaagaaattcctatggtaatgatagtaaggcttaagaaggtaaaacgtgatagcttaaaataaattcaagtttgtcgggtaaatagcaaacccagccgagccagtcaacggtcaagatgaacggcgcatatgcgcagccgttgacagccccgcccgcctttgctggtaggcaatcaaggggcgacagcaagaagtgccaccgccccgcactattattcagaaaggggaatttccatgaccgaccagatagcctatcaagaatatatccagcgcaggtacaacgccttttgcaagactgttatccgctgtgccgccttggacaagattttgaagcttaaacggcaatgggaacggcaagtttcccttgactatctgatgaacgagaagtttgtccagtttgccgcgtcggagccggacgaggaatacccatttaccgtctgcggtcagaccgtcctgctctgcaacgccgcccttgccgacgcgatctctgttttgccggagcagacgcgggaagaaatcctgcgctattactttctgcgccagccgcagcgcgtgatcggcgcgtgtattggccggtcacgcagcacagcggggcggcatatccagcttgccttgcagcggctacgcgaagaaatgggggtgagccggtatgagtagacttctcccctatgaaacaatcctcaaagcccgtgagggcgacccagaagccgtgaacgctgtcctgctccactacgccggatatatccgctatttctcaaaagtgaacgggcaggtcaacgccgaggtggaggactatgtaaagcagcggttaattgactgtcaattcaagttccggcttgacgaaccaccggacaagtcataaaaactgaataccagccgccaccgacgcggccagcgaaagcagtaagtcttgaaaaagatttactgctttttttgttgtccggctccgctcccggccattttgccccctgccggttgtagtagtaagcgaggagggaatttttctgccctggtgtttggcatttggagcatttacccgtagtagagggcaaagagaaaggatttctccaacaccgggtagaaaccactgcgtccggtgtcattttagcgaaagcgggcaggaatgccctttacaggattagtagtagcagaaaaagagaaacaaacttttgtggttgcagttttccaaaaaagtggcggacggaagtgagagaaagtttgcagtcacggagagcaagtttctaccacggtgccaaaatccgcaattctgcagttttgcccctcgcgggaaacttgttggggagtgccttccccaaaccctgctcatgcgcccttacgggcgagaaaggaggtcacaccatgcgaaagaaatacaacacgccccaccgcagccgcgttgtgaaaacccggctgtccgaagatgagtatgccgacttcacagcgcggcttgcgccctatggtatcagccagtccgaatttctccggcaggcgatacggcgggcgaccatacgcccggttgtccatgtgtcgtcggtcaatgacgagttgctttccgctgtcgggaagctgacagccgagtacggcaggatcggcggcaacctcaatcagattgcccggtatctgaacgaatacggcgtaccctacaacaccctttccggcgaggtacgcgccgccatatccgaccttgccgtcctcaagtatgaagtcctcaagaaagtaggtgacgcggttggcaacactcaagcatatcaactctaaaaacgccgactacggagccgccgagcaatatcttctctttgagcatgacgagtttaccatgaagcccgtccttgatgaaaccggcaggcttatcccccgcgaggactaccggctgtccacgctgaactgcgacggggaggattttgccgttgcgtgtatgcgggccaatctccgctatcagaaaaaccagcggcgggaagatgtgaaaagccaccactacatcatcagctttgacccgcgggacgggccggacaacggcctgaccgtagaccgggcgcaggcgttgggggaacaattctgtaaagagcattttcccggccaccaggcccttgtctgcacccacccggacgggcataaccacagcggcaacattcatgtgcatatcgtcataaacagcctgcggattgaggaagtgccgttcctgccctacatggacaggccggccgatacgaaagtcggctgcaagcaccgatgtaccgacgctgccctgcgctacttcaaatccgaagtcatggagatgtgccaccgggaggggctttatcaaatcgacctcttgaacggcagcaagaaccgcgtcaccgaccgggagtattgggcgcagaaaaagggacaggccgcgctggacaagcagaacgcccccatgattgccgatagtatcacgccccggcagaccaagtttgaaacgaacaaggagaagctgcggcagaccctacggaaagcccttgccaccgccgccagctttgacgagttttcctctctgttgctgcaggagggtgtgaccgtcaaggagagccgggggcggctttcctacctcacgccggacaggacaaagccaattaccgcccggaagctgggcgacgattttgaccgcgccgctgtctttgccgttttagagcaaaacgccgccagagcagccgaagcgccagccagatcccccgatcccccacgcaccataaaagaccgcttgcaggttgccagagccgagatagccgccccgaaacaggacggagtgcagcggcttgtggacattgagcagaaaatggccgagggcaaaggccggggctatgaacgctgggcgaagatacacaatctgaagcaggccgccaaaacgctgtccgtctaccagcaatacggctttacttccccggagcagttagaagccgccgttgacaccgcctatcagaaaatgcgccagaccagcggcgaactgaaagcactggaaacgaagctgcaagggaaaaagaagttgcagcggcaggtgttggcctacgcccagaccaaggccgcccgcgacgggctgcgggcacagaaatccgagaaagcccgcgccgcataccggcaggcccatgagagcgattttatcatagccgacgcagcagcccggtatttcaaggcgcatggcattaccaagctgcccgcccggaaagcgttgcaggccgagatcgagcagcttatctccgagaaagacggcctgtataacacctatcacgaacagaaacagcggttcaaggagttgcagaccgtcaagcggaacatcgaccagattttgcgccgggacgagccgcaccgcagaaaggagcagagccatgagcgataacctgccccacatggactaccgccagcaccggcgggcgcggcggctggtacatgagtgctgtaactacgatgaggggaactgcctgctattggacgacggggagccttgcgtgtgcgtccagagcatttccttttccctcatgtgccactggttccgtgtggctgtcctgccccttgacggggagctggccgcagccctcttgtgccggggaagccggaaacggtgtgccgtctgcggggcggcctttgtccccaaatccaaccggggaaaatactgccccgactgcgccgggcgcatgaagaaaatcaaagccgccgagagaaagcggaaacaaaggcagagatgtcacgctttagagcctttcaaacccgcataaatcaaggcttttttcgtgggtgtcaaagggtacgcgatacatttatccttttcccccggaaacggcgttttaatgcgtgacaatacgccaaaatcaacccgaacacagggaggtgatcctatcgctgattatatcagggcagacacgcggctgcccgcctatctgccgtatccccgtttcctgctgaaaatggagatttcacagaccgccaagctgctgtattcgctgctgttagaccgttccaccctctcccagaaaaacaagtggctggacgacgagggcaggatttatattatctatcccatcgcggagatagcagaaatactggataaaggcagcaccaccatcaagggggcgcttaatgaactggacacggcggggctgttggaacgggaacggggcggcttctccgcaccgaaccggctttatgtcaaagtaccgccagtgccacaggtacagttttcagaccaactgatggccggaagtccgcccctcatagagccggaaaaccgtcctactgatggtcagaaaaccgaccttatgatggtcggaaaaccgtcccctaaccaaactactataaacaaccttacagagagccaaacaaagggagtgagtggggggccgtccgcgccctatggccgatatggaaatatttttctgtcacagaccgaatacgacgagttgcaggcagagtaccctgacaggctggaacggttcatcgaggaaatgagccgctaccttgccgccaacgggaaaagctaccagaactatgccgccgccctgcggatatgggcggggaacgacaaaaaggaagcccctaaaaagggcataccagactactcatgcaaggagggcgagagtttatgaagaatgaaatcaacgcggttttggagaatatgacgaccaccatcccggagccggaggactacaccggcgaggacggtttactgtactgcggcaagtgccgcaagccgaaagaagcctattttgcgccggataaggccgctatcttcgggcgcgaccgccacccggcagagtgcgactgccagagaaccgcccgcgaggaacgggaagccgccgaaaagcggcgcagacaccttgacaccgtggaagaactgaaacgccggggctttaccgaccccaccatgcgggactggactttcgagaacgacaacggcaggaacccgcagaccgggcttgcccgccggtatgtggagcattgggaagatatgcggacagacaatatcggctgcctgttctggggcggcgtaggcaccggcaaaagctaccttgcaggctgtatcgcaaacgccctcatggagaaagaaatccccgtccgcatgacgaactttgctcttatcctcaatgaccttgccgccagctttgaggggcgcaacgagtacatttcccgcctttgtcgttatccgctgctgatccttgacgacttcggcatggaacgcgggacggaatacgggctggaacaggtgttcaatgtgattgacagccgttaccgcagcggcaagccgctgatcgtcacgaccaaccttacgctggacgacctgcacaacccggaggacaccgcccattcccggatttatgaccgcctgctttccatgtgcgtcccggtacgctttaccggcgacaacttccggcaggaaaccgccaagcggaaaatggagagcatgaagaaactgattaccgactgaaaggagtattgcctatggcagataacaagcagcacgacacccgcaccacccgccgccctgactgtgtgacggaaatccgcatgggcaattccgtccttgtcgtgtccggctatttcaagaaagacaccacaaccacagccgccgacaaaatggcgcgggtactggaagcggaagccgctgctacacaggagccgacttatccggcgtgaaccggggcatggaaaagcggccatgccagggagcatgaccgctggaacgaaaatcggaagtgctttagcaattcttaatctcattctctataaaataatttgcaatttcaaaggcttttattcttctctttgccaatgtgatttgtgatttataacgctcggaattatcctttgattcaaatgtttttactgtttctcttagcttgtgcagagttgaatcaatttgccttttggccgcggttaattcatctattgtatacttcatgttttctcctttaacttctgatttttttgttaaatcagagtataccacggagttatgaacttttctactgcaaatatgggacgacaacccataccataaaaatcggaaaattgaaaagctgtaaagaagcaaatttaacgcttttgccgctgtacagcccccgccgttccgtggtacaatgaaaccacggaatagtggggctggctgtcggaaacggaggattttatgttaagacaagccacccaaaacctcattaccgccctttatccgagattgtcccacgaggatgaattgcaaggcgagagtaattccatatcgaaccaaaaaaggatactcgaaacctacgcaaaacagaacggctttaccaatctgcgctggtacaccgacgacggtttttccggcgcgaactttgctggggttagatagcgatactttttacatctaccatgttgcggcggtcatggttgacaacttgcgtcggctcctgctcggtatcaacctgtccgacaaagctataatggatttcgattttccgggtgttggtttcccggtctaattcatgtatcaaaatacggtcgataaactcatggacgttttcataggtcaattcctgtatgtcgctgtatttcccgacaatctgaataaaccttgatatatccctttttcgctcggtaacggttgcgatctgctgttgtaactcgtctatccttgcggcaagggatttcttttcgtcctcatagccggaagttagaaacacaaaccgttcatctgtcagtctgcctaatgcgttgtcctcatacagcttgcggaaaagcgtgtcaagttcggtcatacgcgcctgtgctttgaaaagttccttttgctgctgcgctaatgcctttctcgcttccatgtcgccgtactcggtagctttacagataaagtcctgttcgtgttccttaacataccgcaaaacccgccgcatatcttccagcactaaatcaagaagtacgtttttgcggatataatgagaggtacactcgctgcctgtccttgccctgttgcgccatgcgccgcaagaataggaaaacttgcgcggctcgatatttacgccctgttggtaatacatcttatgtctgcaaccagcgcaaaacagcaagccggaaaaaatatcaatctccgctgcttttgtcgggcggtggcgggtagcaatccgcttttgcgcaagttcaaaggtttcctcgtcaacaagcggctcatgggtgtttgggaagaaatagcgttgttcttcttcgttcttccgggtctttttcgacttgtaggataccttgtgagttttcgcggttatggtatgccctaaatattcctgccttgctaatatgtcatagagcgttttgtccggccaagtatagggggcgatcattgcccgctgataccgcgcctgtcctgtacgctgatagcgcaacgctccaatcgtcaagactttgttttccgcaagccatttttggatttcgcacatacgcacgccgctaacaaacatagcgaaaacctgtttgacaatcggcgcggtttccgggtcgggtataaggtggtggcggttgttcgggtctgggatatagccgtatggatattccccgttgacgcgctcgcctttttgcgcctgtgcctgtttaactgcgcggattttcttgcttgtgtcgcgggcgtaaaactcgttaaaccagttccgcaagggggtaaactcgttatcctcccgcgctgtgtcaactccgtcgttgatcgcgatatagcgtactccgttttcgggaaatacaatctctatgagttcgcccgttttcagatagtttctgccaagacgggaaaggtctttggtaatgaccgtcgccactcgtccggcttccacttcctgcaacatcgcttgcagcccctcgcgctcaaaactcacgccggaaaatccgtcgtccacaaaaaactttgtgttcaaaaaatggtgttcgtccgcatagcgttgaagtatcattttttggtgctgtatgcttccgctttctccggcttgcatatcctcttgacttaaacggcagtaaagggcggtgattttattcgactgtaacattagtcctcctttccgacagccgaataaacaggtataatgtgttgctatcattataccatatcccgccgcctaatgcactactcggacgctaaaaatcccggatttccgggctttttctgcaaatcctttacaatgagtttctcaatctttttatggattgtatcggttgccttttcactcggcaacgcttgaacaagataggtgattttccctattttgcgttcggttgtaattgtctgttttttatccattagaaaaacctccttttcctgtatggataaactatattcgtcaaaaggcaaaaacgggcggttgttagctgcaacctcacgggagtttcaccccggcccatgcttatgggtgcgccgcgcaatactttgagggtgttcaacgcgggagtatcattgtgccgccttgtatgtcgtcgcccacaagctgctaaacctgttttacggcgcggtagttctcgctcggcttttcccctatggggaaaagctgtcatggcgtacccgccgactggctcggtacagacggaatgtacccgtttgcctgttatgctgcgcaccaaaggccgctttctttgtcaaagaacaataggctttgtcggcctgcaaaagcacatcaacagcggatatgcttttgcggaacgacaaatagcccataacgggaagcgtggaaaggggacacgctccccgcatgggctaaaagattatcctacatgaaaagcaagggtgcgggtaataaggcgcacttgcagcctgttacgcatttcctcgtccacataggaataggtattgcccgcgtcgtctttcagcgtgcgggtacaaagtttcgctatgtaaccctcgtagtgcttcaagatcgcgcacatggcggttgtgtcgccgtttgccgctgcggaaatgacagggaacggcaacagattttcagacttcctaacggtattcatcatctgcttttccctccaaatactgtttgattttcgcaagcgcggatttcctgtgccggaaaaccgtcgtgcgtacaacattcagcagttcgccaatttccgcgtcgctcatatccaagaagtaggacaaaaggataatgtcgcgtttcctttcgggcaaagcgttaagggcttcggcaagcagttcatttttgacgagtacatcaaagccggacacttgaaaacggaaataatcgctttcgtattcgtccgttgtgaaaagctgcgcgagttcgctttcgctcaaatccgaaaaagtaacttcgcgtgctgcgcgtttcgcaagagtgcggcggtggcttttcgcttcgccgaccaaagttttctttgctaatgcgtcgtactgatgttgtattctttccttgtcggaagaagatagctccatagagttcacctccttcccgcgtggagtagaggacgggagttaagggcttgtcctctctgcccctttcgctccgtacccgttcgggagatggctcttgagtgcgcttttcagaaaaaagttgaaaaaagcaaaatgcgcccgtccgcaagacgcggacgggcgcaaaggaaatgtaagcagtagctaaatgtattgacagttcacattcatagccggaatatcccgcttgcggagcatagctttttttgaccgcaaagcattaggcgggttacagtaaataaaaatggacacggcgatacctccccgataccgccgtatccttaaaaaagggcgactttaatacactacccgcaatccattctataatagggaacagcggcttttgcgcaatattaaataaaaaagccgataacacataggttttttgacctaatgcgttatcggctctgcgtctatgcgtctggcacttttaatcatttttttttgaatttattatatgtgttagctaactgtccacaagccgcgttaatctctctgccatgagaaactctcatagtaacttcaagtcctgcttgctctaattgatgtttgaatgcaactatttcccgtttctgtggtgctttaattcttgaattgcttgttgggttgtattgtaacacgttaatcataacttttttgccccgaaaccattttgcaagttgtcttacatctgagggccggtcatttatacccggtaaaagcaaatacgcaaagacaattttgcgattatgcctttcagaataggataaggcttgcttaacaacatcttcaatagcatatatgcgcatgtgaggaataatacgatttcttgcagattgtgttgctgcgtgtaaagatattgtcaactgaattttaagatgttcctcgcgcaatttttttaattgatcgaccggaccaactgttgatatggtaatgccgtcggttggaaagttgagcccatatctatctcggagaatatggattgcttttatcaagttgtcataattgaataaaggctctcccatacccataaaaacgatacggtttacttttcgacgcaacaatataatctgttgtacgatttctgacgatgttagattacgaacaaagccatttcgcccggactcacaaaaaatacaaccaacaggacaaccgacttgtgtgctcacgcaaacagttccaccatctcgccgcttgataaaaaccgtttcaatgtatttgttgtctttcagttcgtaaacatacttttcagtatcactgcttttgcaaatattttttaccaacattgatagattttttttgcgtggtaattgcttatataattcttcatataaggcttttgcttcattctcgccaataacttccgacatttctttgtaagtaaatccgtatggatcattccgtacttccgcaggcgtatatttaggtaaacgtttcatttttatatcctttcttctaaataataaaagtttgtttttctgtatttttgattacaatctctaatttttctacatcaatgatatgcgtcaatttgcatttagggcagaaaagaggaaaatcttttaatacagtattatgaaatacttgaactctcgtctttccgttacaaatcggacattttatccaatattttttaagcattatatttcactcgtcctttttacacaaaaaaatgcaggtcaatcctcaacatgagcattgacctgcatttataatgcacagagcagtacaacaaaactaaggcatagcttgcactatgtctatactatatctatacgtcgttagttttttgtatagcatccgcaaaataagcatgacaaaaaagcccatgttgaaaatgggaaaatcctttttttcaatgcttatctaatacgcatgctatgcaacataaacgccgcctccttttacataaattttattttatcagaaaatcagtctactgtcaatacacaacaggaagtatttaacctaatgatatgaattgtgtggacatatccaaaaagaaaggtgaactgtaaaatgtaacagggtgaatgaaaatggcaaaaagacccgtaccattgtacgactttaaggctttcggggcagctataaaagccgcgagaaatgaatacggcgagagccgcaaaaaggtaagcgacgagttatatatttccccgcgctaccttgcgaatatcgagaacaagggacaacagccgagtttacaggtattctatgaccttgtaacccggtatcatatttcggtagatcaatttttcttcccgaacagcaatgcggagaaatccaccgggcggcggcagcttgacgcgctgctggacggtatgagcgataaaggcatacggattgtaaccgcaacagcaagggagataacggaagtcgaaaaagcagaggattaacctcacaatatgagaaatcgggagattgcagcgcatggcggctgcaatctttttttgcgtccaaaatcaaaggaacgcgcaacaaataccgcctttcggtgggggtatggagtagatagcaagcacagcaaacgagtacccgtttgcggaaaatgcttgttgggataatcccaaacccttataccgaaaggcggtgcggaaatggaaaaccgaaagagaaatatacagatgaagttttacgttacggaagaagaaaagcggctgatcgacgagaagatgaagcagcttcccataaagcagtatggggcatacttccgtaaaatggcgatagacgggtatattcttgtcgttgaccgaagcgacacaaaagcatatatccgggaactgcaagcggtgagccggaacatcaaccaaattgcaaaacgcgccaatgcgacggggacggtttacaggcaggatatagaggacattaaaaaggcggtggacgagatatggcggttacaaagacgcaccctattaaatcaaccttaaaggctgcgatagactatatcttaaatcccgaaaagacagacgggaagctgcttgcgtcctctttcggctgcgggctggaaaccgccgatattgagtttgcatggacgcgggaagctgccggagatcgcggcacacatttagggcggcacttgatacaatcctttgcggtgggagaaaccacaccggaagaagcgcacaaaatcggcatggaacttgccggggcggtattaggcggcaagtatgagtttgttttgacaactcacgtcgataaagaccatctgcataatcacttgattttcaacgcggttagcttcgttgactacaaaaagtaccattccaacaagcaaagctatcactttatccggcgcaccagcgacaggatatgtaaagagcatgggctatccgtcgtcgtaccgggacaggacaagggaaaaagctatgcagaatacaccgccgaaaagcaagggacaagctacaaagcaaagctgaaaacggcgatagatactctcattccccaagtgaaagattttgacgaactgctgcgccgcttgcaggaaatggggtatgaaatcaaacagggcaaatacatttcctttcgcgctgccggacaggaacggtttacccgcacaaagacgctcggcgcggcctatacggaagaagcgataaaggagcgtatcaagggcgtgtatgttgccaaaacaaaaacgctgcgggaagataagaaaatccggcttgtcgtcgatcttgaaaacagtatcaaagcccaacagtcggcgggctatgaacggtgggcaaaaatccataatctgaaacaggctgctaaaagcatgaacttcctaaccgaaaacaagattgagtattatagcgaacttgaaagcaagatagccgatattatgaccgctcatgacgcggcggcaaaggcggttaaggaagtggaacagcgtatgtctgatttgtcgctgcttatcaagcacaccaccacataccgacagttaaaaccgatttacgatgaataccgaaaatcgccggacaaggaaaagtatctgcgggggcatgaaagcgaaattatcctgtttgaagctgcggcaagggcattaaaggaaatgcagataaagaagctgcccgatctcgccgcgctgcgcaaggagtatagaagcttaaacgacaggaaaaccaaattgtatgaagattatcggcaagccaagaagcaaatgcaggaatacggcgttgtcaaaaagaacgtcgatagtattctttacccgtcccaaagcagggcgcgggagcaggagcgataaggcgcaaaacatggggtggcaagtggaatgttaagggctgaaaacgcctgtgtttctgcggcttccagcgcatgaaaacgacatagacgataaagtatattcaaacccgcaaaaacggctttctaattgtccacgcaaggacaaaaaaagaacaggggcgcggtgccggaaatcggcaaccgcgcccctgttctctatgggctattcctcgtcggtcaagataaactccctttcggaaaactcgctgtccgtcatggcttgcagcttgttcaccgctgcggcggcaagctggcgcatatcctcgtccatgtagggcatggcggcaaggatattttcaagcgttgtttcccggctgtcctcggcgtagatcgcaacaatgttttcttcctcaatggtaaagcgggtattcatgctatcaaacctccaaatcctttttatgctctttctgtttatctttcggctgctgcgccgcctgtttcttgtattcgtccagcttcttcaaaatggacggttttttctgcggctgttcccgtttctcggcttttaccgcttttgcaaggtcggtaacggaaatcgcttcccccgcctttgcccgctgctcaaaatctgcaacggtgggcgtttgcggcgtattgttgataagcccgtcaaaattgttgtcgttctgctctatggtgtcctcgacgtgctttaagggattatcccgctgcggctgctcggcggctatggcataagcctgtgtgccattccccataatgagatacttcccgtcctccgacgcatggtgaaaaccaaatcccgccgcttcgatctgttcacggctcatatcggtaatatgaaaattgcccctcggcgttctaacggtttcacccgtcaaaaggctgtcgggggtcgcttccggctgctgcttttcaagctgcccgtccttgtaggaatatccttgcgccgcgattgcttcaagggtcttgcccgtaacgtcgccataaatccgcttgtctgcgtcaaccagcatttgcaaagtgtcttgtacggtgtcggacaaggcttgctgctgttcgggcggcagcttgtcaaatacgggggtctgctgctcctgcaaaaactccggcacttgctgaaaaccgatactgtctacatagtgggcggtgtcctcgtcgttctgatgaagcacaacaatgtcggaaacggaaaggctatgccccttaaagtcggcggggtggtcgatattaaacctttcccaaatgtcgcccagcgtcatatcctttgtaagcggtgcagtatagacgagttcataatttacccggtcaatggtaagtccagccgcttgcagacggtcataaggctcaaagcgcaagtcccttgtttcgtccccgcgctttaactgataaatggaaaaggtatcgccctgctcctgctcggcttgccgctgctgctgcaactcggtaaaatgcccctcaatctcggtaatgagttcctttgcggtggtctgtattgtttcaagggacgcttttaactcggtcatttccttgccgctgctccaaccagccacatagccgaaagagtaatcggaagtatcaaggccgaaatgctggcaaaccgtataagcgacgctttccgcttctacctcgcaggtatggcggtcaacgcggttttgctgctccggcggggcgtttaagtctacgtcgtgcagcttcgcatgggcgatttcgtgaatggcggtctttaccgcctgtaattcactcacgccctctttgattgcaatacgcttgtcggtcaaactgaaatacccatttgcgccgtttgtgatctgctcaaatgcaatcgggacgggggacgctttttcaagggcggcgaaaaaatcctcgtactgctccacatcggcaagcagcggtttaacggaaaggtcgggaaactccttgccctcggtctgcgaaatatcaaagacggttataaccttaaaggcggggacggtgatttccttttcttcctttaccacttttccctcgcggtcaagcatgggctttctcgtttcggggtcgattttatcaaccagctttttcaccttgtagggcgcgggggcaaagattttaatgcctttctcgcctttctttacatggcggtcaaactccttttcccattgacggaagcccattaccaaattgccgccctgcatagcaattaggatagtgttattcaaactataatcatggaactttgacatagcggttagaaactctttgtagcggtcgctgtcaaaaatcgcctgtacgccctgttccaaacgcgcggtgatctcctttaccttttcggcgggcttttcggaagtaaggataatggggacgacggggcggggctgctgcggctctgcggcctgtgcgtctgcttgctgcgtttcggctgcgtccatataggctttgtcctgttcgccgcgctccggctgcgggtaactcataatgcggtattcttccggcacttcgcgcccctcaaactgccgttcccactcgtcgccgctttccacgatatagccgtactcggtaaacgcgcctttttcctgcgcggcagcgttcctgccaaaagtagaaaggtcaatgccgcctttccattcttcgggcatttgtaccatgccggattgatttaagtaatagtcgcccaaatcgtggtagttatgtacttcggggatatggacgtaaaaatccacgttgtaggtgaagtcaattacctgtccaatatttgcaagcccgtttttctgctgcaaagctgcgttcagcttgccaacctcggcggggtcaagctgttcgagccgcgccgcaagaaaattgagttcgtccacgtcggcggcgcataccatttcataaggcaaggcaatatgtttctccgggtcgtcggaatagccgcgaatggaaaaatcctgcgggttgtcggcggtaatgccgacgttccgcatagcttcgtgcaactgctcctttgtggcgggcatatccaaccaatagccgccggggtcgcccgcgtcaaagcggctgcggttgcctatcataatagaaaactgttcgctcatgtgttcacgctccttttcctgcccggtattttcggggatagctgccgcctgttgctgctgcgggggttcttcgccctctatggtgtagtccggcatgagcataccgtttactttgaaatagtcggcgtactcctgcgggataggcggggagatttccgtaaacaagcggtcatacgctttgatacgcccattcagatacttttccatagctgccttgtcggtgaaaacctttctatcttgtccggcaatcttcgcttgggttctgcttgggctgttggtgcgcacgctccatgtaagcgtccatgaatacgggatagatttctgcgcttctttgtcgtagcgggtattctcgtaaatgtagtaattcatctgatatacccggttgctgcgaatatggcggttatgctcggtggtctgccactcgttagcggtgtgctggacgtgcggcgttctcacatattcaagtgttttatccagcaaaagcgttcttcccgcctgttcttcccatgcggcggcgcgttctttaaggtcgtcaaaaatcgcctgttctgccgccgcgctttcgctgcgcatggaaagtagctgcgcaatcggcaaggaagcataaggggcaatctccctgtcctttgcttcaaaatatatccggcgttctatccgcatggtttcggcggcttctaatttgtcatggtcgtatgaggaatacggcatattctttcatcacgtcctttctcggtcatataagggtttgggactatcccaacaagcaaaatgcccgcgctctctatgggaagcgcgggcatttctcgcaaacgggtactcgtttgctgtgcttgctatgtagttgtttttatccgtaaacgcctgtttctctcgctttgggctttctgtctgcggcgtatctttgccgcgcaatcggggcagtatttcgcccggttgctgcccgccgcaaacgtgctgccgcataccgcgcaacgcttcaaatcggtttccccgctgcgggtgatctgttcgcaaagctgcctgtcggcgggtaataccgcttcgcggaaatagcggcatagcagcgaatagctgatactctgcacacaaacgcaagtttccccgtcgtccagcagcagacaattcccgcaatcgttgtttgcacaagcggcgcgggtcattttctttacggcgcggtattgcttttcatcaagccttatcattttcggttctgctcgacgcggaagtttacatacttgccgcctgtgtcggcaagcagcacaactccgtcaaaggtctttcccgtcttggtcgagtacatacctttgatttttacctttccgtctttcaaaagggcggcggcaatcgcctttgtgaaagcctttttgcgctgctcaaaaaagcggtcattcttccacatcacaaagctgcaagccctgtcggagcagtaaaagtttttcttgccctcgtaaaccgccgcgccgcaacgggggcaagtgccgattgcttcccgctgcggggtaaacagcttcgctttatcctcggaaatcgcggaataggtcttgacaagccccgctgtcatttcctcaatcccgcgcatgaagtcggcggggctgtcgctgccctttgcaatcccggtaaggcgcgtttcccattctgccgtaagctgcggggacgtaaggctgtcgggcagaatagcgacaaggttatacccgtcctttgtggggattagctttttgcccttgcgctcggcaaagcccgcgctaatgagtttttcaatgatacccgcccgcgtcgcggtggtgcctaaccctttgcgctccgcgtcctccggcgtgtcctcctttcccgcactctccatagccgaaagtaacgtatcttcggtaaatgcctttgggggctgcgtgtaacgttcggagatctccgctgccggattgtcaaaggtctgcccctcggcaagcgggggtaaaaccgcttccggctctgcgtcctcgtcctgttccccggacgcggcgcgggatagtctttcaatctcgcgccaaccctcgcaaagcgtcgtcctgccctttgcggtaaaggtatagccgccgcaagtgaaaaccgccgtaaccgcttcatactcatagggcgcggcaacggcgcaaagcagttttgcgcacacaagggtcattagctttttctcactttcggcaagggaagaaaagcccgttttcacaaactccgctgtcggcaaaatggcgtgatggtcggttactttgctgttgtcgcaaatcctcgcaaggtcggcttgcagcttcacgccctgcataaaggggagagcagcgcaaaggccggtgataagttcctttgtgctgccctccatatcggaagtgatatatttgctgtcggtgcggggataggtcaaaagccgtttttcataaagggcttgcgcatagtcaagggtctgtttcgccgtaaacccatacaaacggtttgcttcccgctgcaaggcggtgaggtcaaacagtttcggcggggctgcggtctttttctcttttttaagggaagtacaaacggcctgcgatttctcgcaagccgctttcatctgccgcgccgccgcttcgtcgtcctgcctttcggaaagggcggcaacgccgccaacgtccagccggacgacatgatatttctctttcttaaagctgctgattgcatagtcgcggtttaccagcatagcaagggtgggcgtttgcactctgccgacattcaatgttttatggtagaggatagagaaaaggcgggtcgcgttaatgccaatgagccaatcggcctttgctctgcaaagcgcggattgatagaggttgtcatagccgcgcccgtctttgagatttgaaaagccctcgcggattgcacttgcttccatgctgctaatccaaaggcgggaaaagggctttttgcaattcgcctgttcatagacaaagcggaaaatgagttccccctcgcgcccgctgtcgcaagcattgataatctcggtaacgtcgctgcggtgcataaggtctttgagaatggaaaactgctgctccttgccgctggcaacaataaactgccactcctgcgggacaatgggaagatcgtcgtacttccatttacggaattgttcattgtaggtcgccgcgtctgcaaggctaatcaaatgcccgatacaccacgacacaaggtagccgccgccctcaaaatatccgctgcgcttttcattcgcgcccataacggcggcaatcgccgccccgacgctcggtttttctgcaattacaagtttcatagattatcgtcctcctgctcggtctgttcggtttcgactacttccgtttcctcgtcgtcctcgtcaaaatcaaggtcgtcaaggctgctgctgcctttcgccgcgtcctttttgggcttcaaaatcttaaagtagtagaacgcgccgccgcccgctgcggcaacaagcagcacgacaagcagaatacccatgccgccgcctttttcttcttccggcggctgctcggtttcttccggctccggctcggcttccacacccgcgcactcgctcatgttgacgctgcaaaccgggcaagcggtgttgacgcttccggcaacgcatttatcggtgcagctacaaacgggggcttcggtctgcccgtcctccataagggcggttaaatccgcttcgtccacttggttaaggaaatggacggtattttccccgtcctcggcgcggtcaatgatgatgtaaaaatagttgccacttttggtaacgacggtgataaactgcttgtcgccggacgcttcacccgttatatcgtccacaagggacatattcccgtccggggtaaggggctgcggctcatagccgcccgtcgtttcttccggctcggtttccggcgcgggggtttcctcggttacgggggtaggcgtgtcgtcgctttcatcgccaccgcccgcataagcggtaacagaaaagccgcacatgataaccagtgcggcaagcaatacggtaaactttcggattatctttttattcttcattgtcgttgtcctcctgttcggcggggtaagtggcttccggctgcggcaaggtgatttcgccgctggcgtaagcggagaggaacgcggcaagctgcgtcccgtcaaggtgtaccgcctttaccatttgcacgatctgcgcgttttcttcctcgactttctgcgcttcaaggtctttcagcttcttttgctgttcaaggatttttgccctcgttttctcaatatccctttcgatacggtcaagtttcgtgttcgccatagtcatttactcctttccaaactgttctttccatgaatagctgcgccccaatcccttaacggttttaagatagggcatagcgttttcttccaaagtcgccgcccggttaaatagatcgggatagtgttctttgagatataaaatctcttgtttcttcatgctcggacaaaagaaacaggacgatttacccggctgcggcaatcctgccgctttgatttcccggatacaatcgtccctgttccagccccattcttcaatgagggggtagcggttatgatattttttgtcggcttcgttgtacttgcgggaatgttcataccgtttcacttctcccgcgtcatagccgatatagcggttgactttctcgccgcgctgccatacttcgcggcaaggcgcatagtggttgcaaaacttttcctgcggtgcgattttgtgtttctgcgaacaacgcttatgcccgtaggcaatcgacgggagcgtatgagagcgcaagcactcggtttcaagagataggcggttgccgtagcggtcaacatactgcacaacggtaatctgcggcataccgtgttccgcaagccattgattgattatctcgataaattgataggtatgcgggtgttccgcgcccgtatcggcaaaggtgataaggtcaatcgggattttgtgcttgtataggccaataagtaaggcggcactattcgtgccgccgccaaaagatacaatattcatttttcaactccttttaattgtaatttaaccgcccgtaggcgtaaaagtgggattgccaatagctggtgtccagctttgaatactggatagggtcgccacaatgcagcatgacggggcttccgtccccgtcctcgcccacataaatccccacatgggaaacgccgggggtgtcgtatgtacccgtaaagaacaccaaatcccccggctgcgggttagaaacaggggttgagatgttgtaaagcccttgcgccccaagtctgcccgtattgtataggccgctgttcgtcaacacataactcacaaagccgctgcaatcaaaagaggtttccggggtgctgccgccccacacatagggaaaaccgacgtatttatctgcttcctccatgagccgcgcaaacttttcatcggaacccagcagcgcggcgggtacttcataatcggcgggcgggttttcatagtatttagacacatagccggattgcgggaaaaggtcgggtctgtttcccagcgacgacatatacatagcgtacatggatagctgttcttcgcccatgatgtaaacggggacatgggagaggttgaagttttccaaatccacatgaagaatgtaatagttataggggacttcaaccgtataggggttgccctcgctgtccgtccttgtttcggtgcggtagcgtacctgtacttcttcctcgaccgtcaagatatactgtttctcaaagagcatttcaagggtgctttgcacttcatcgagtgtaaacacgccctcatgccacgcggaaaggatagaaattagcacataggggtcatgctcgatctcgtccgcgtttacccggtattcgtcatagccggggtattcgctttcgatattgtccagcatatcttgtaactcggcttccatagcggcatacgcgctttccgcgcccgttatatccgcgtcctcggagagataggacgacgcaatcaagccgctgccgctgttgccgccaaagagggagcaagaggacagcccgccgaaaagcagcagcacgataaaggcaatcccgcccacaatcaagcagcctttccaatgccggacaacaaagaacgtcgcccgtttggtttcctgcgcggttttcttcgccgcctttgcggtggcttcagcggtttttttcgctttgccgcccgctttcagcgtttttgcatactgctttttaatgcgctgcttctgccaaaaacgggaaatggggttggagtgcgcaagcgcggggttatcgtgcaacgccttttgatagagaaaatctgcgtttgcctttaccgcttgtttttccgctgccgccgctgcccggtagggtttcagcttatggcggcgtatgccgcccttaactgcccgcgccgccatgccgcccgctttctctccggcaagttctacccggtgcccgctttccacaccgacgttttctttctctacctcgtagattttcccatgtacggtactgtttaactcctgtgccggacgggataaggggttatgccgcaacttgccgtttgggggcttatccgtcttttcaaaggaaaggcgcgtctttgccttgcctttcgcttcgtcaaaaacgcgctctttcttgattttggtctgcttggggatagccgcccgcgctgcgtctaaacagtctgccgccttatccgatttcttgatcgctttttgaagttccggcgttgcccgttccgcttcggaaaactgcaagcgggaagaatgggttttaggctgcgtcgcgtcaagggcttttttctccgcgccttttgctgcgtgtcgctcaatctctgcgccgatatgctgcacaaccttttccgctgccacccctgcgggggctgaatagttttcttcctgcggcctttcgctgatactggacgtttcgcccgtcgtgaggttttccgcaaccgcaccgtcgcgggtcattttttgcgttaccttgtcgggggctttcagttccttgctcaatcttcatcacctccaatccgctgttttgcaagttcgcaatagtcggggtttaactcaatgccgatatagcggcggttaagccgttttgctaccatgcccgtcgtgccgctgccgaaaaaggggtcaaggacaatcccgccgatgggacagcccgccaaaatgcacgtttccgcaagtttcggcgggaacgctgcgaaatgcccgccatgatagccgacattgttaatctgccaaacgttgcggcggctgcggacgggagaaatcaactcgtcggcgtatgcgcccttttcgcgggggcggttgattttctgcggttggttttgccccggaacagtaacgttatacttatttcctttgctaactccgcttttcagccgccccgccgttgtgggggctatcggctcggctactgcttgccaatcgtaataatacttctttgacttggtaagcagaaacacatattcatagcagcgggtcggcctgtcccgcgtgctttccggcatggggtttgttttgtgccaaatgatagaactgcgcaaataccaaccgtcgccccgcaaggcgagggctacaagccacggaataccaattaaatctttgggcttgcagccgggggcgcggtggttaaacgccacttgctgcccgttcctgcctttggggtatttggggtcttggtggtcggctttgctgcctgtgccgcaataagtgtccgcgatattcagccaacaagtaccctccggcgtaagcacccgctttacctcatggaataccgccgtaatacgggaaacatattcctccggcgttgcttcccgtccgatctgcccgtctgcgccgtagtcccgcaaggcatagtagggtggggacgttacgcaacaatcaactgcattttccggcaaggtttgaagcacctgcaagctgtcgccgcaatagattttgtccatttctatcctcatgccgacacctcgccgggtttggtcgtcattacacgatagagttccgtatcttgcgggaaacggtcaataaagggcaaaatcacgttgccatagaagataagcccctcgcccgcgtcggaatgggttacataggtcatttgctgctgcgaaatgttaagctgctttgcaaggatttccctgtcgccctgggcttggttgagcatatacacaaaatcgctgttttcaaaaatgttctccacctcgcgggacgataacaaatctttcacgttttgggtgatacctgtcggaataccgccccattttctaaaacgcttccaaatctcaacgctgtacgctgcggtctgttcctctttgagcagcaaatgaaactcgtcgatatagtaccgcgtcgccttgccttcgctgcggtttatggtaactctgttccaaacttgatcttggacaatgagcataccgagttttcgtagctgggtgccgagttctttaatatcaaagcagacaaggcggttgtgaatgtcaacgtttgtttggtggttaaacacgttcaaactgccatttacatagagttccaatgccgacgcgatacgctgcgcttccttttccggctgcttcttgatttcattgtagaggtcgcccaaaatcggcatattctccggcttcgggtctgcaaggtagctgcggtacacgctgataacggcgcggtcaatcaaagtcttttcaaccgcttccagcccgtttttgccgcccataatcaactcgcaaaaggaaaggataaaatcgctctttaaggctatgggcgtgtcgccctcgctgtaattgaggtttatatccatcgggttaatgtactgcgtgctgttctgcgaaaccttgataacctgccctttcagccgttccacaagggggtaatattccgcttccgggtcgcaaatgataatatcgtctgcggtaatgagaaaagcgttggtgatctcgcgctttgccgaaaaactcttgccgctgccgggtgtgccgagtatcaagccgttagggttcttcagccttttcctgtcgcacaaaatcatgttattcgataatgcgtttaagccgtaatacaacgcttcgccgctttggaacagctcttgtaccgtaaaggggacgaaaatggcggtgctggaagtcgtcaagccccgctggatttggattaggttttcgcccaatgggatagaggacataagcccctgttcctgccggtagtcaaggcgggtgagcatacagttgtatttctgtgcgatacttgcggcctgaaatacgtcgttgtccaatttctgctttgtgtctgccacattcaaaactaacagcgtaagcaaaaacattcgctcgttccggctctgcaaatcccgcaaaaggtttttcgcttcgccgccgtaggtggcaaggtcggacggaattatatccatatcgtagccgctgcggattgcctttttctgttcctcgattttcatacggtcaaggtcggtgattttccgcttgatcgtcttgatcgcttcgttgtggtcgatactctgaatgtgcagattgacgacaatcccgttttccgcttccatgaagtcggcaagcatacggtctgaaagttccggcgcggcaatctgcaaaaaggaaaccgcgccaaacttcccgcccatttgaaacattcgcccgtcgccaaaacggaaagaggacggggcaataaagtctttgacggaaaggccgcttacgggtagccattcccacgcaaagttgaagcgttccccgtccgggtggaaaagcccatgcagcacttcaagccgctgcttcccgtccaatacccgcgccgccgcgccgatcaccttaaaatggttgagggtgtccgtttcgatacgggcaagccgcgcccgcgccgatttaatatcttttgcttcaatggtaaaggtgagaaactttgtcttgataagcccgttgttgccgcgttcaagctgtgtttgcagcatttcggtgtattcggctctgatactgtcaaagtcgtcattctgtggggcaatcgtgatactgctcttgaaatcctccttgttcgcatggcggctgattaaggaaagctgcacactgatagaagcgtcaaaagagttatacatatcgcaaagggcttcaaaaatggcggtcttgtcgtccggctgcgcaagctgatagttaatatcttcaaactcaatgcacttggaataccgcccgtttgcaaggcggcaaatcccgtccttatacattcgttcaaacggtatgctgtcctgcgccgtatggggcttcccgtcgccctttgactgccggataagcgcgtcgatctgtttcttttcctgccgcgtaagtttacgctttttgttttgggtctttcccttttcctttgacaatcgcccgtacctccttatctaatcgctcctgccgcgcaagggcggtataaaaattgttggtctgataaggtcgctctttggggcgaagaaacttcacttccacaaattgccgtataatcacttccagcggttgcccgttcttctcgtacatagcgagtaggaacatgggcagcatggcaagcaccatgcacaaagccgccgttgtcgttcccgcgctgtcctttgtcaaaaagaatagcggtagcccgatagccaccgccgcgccgaaacagagtaattgtcttttggtaaggttgaacattaccttgctcttgattttggttaaatcctttgggacggttacatacgccatttcaaacctcctttccggcaaaccgtatgtcgcttttgatttcatttccccatacgtcccaaccaggggtatgctgccttgcaaacagttcaatacgcggtaggtcgcccataagggcaagtatcttttcccgcgttatatccggctttttgctgtgctgctcaacaggggaaataataaattgatgtaccttgtttgattgtcgcttcgggtgtcctttggtagcaagcaagcagatttccgcatttcctcgcgtccaaaagcccaagccataaaaccaagtgggcgatttccgattttgctttaaccatacaaaggcaacggatttataggtaaatccccaagccttgattaactgcaacgcttctttaagctgcgggaacgtcgcccataggaataaaatacagtccttatccgcaatttctttgacgggtaaagcgcaaagttcctcaatactcatagtgggatagtgcttttccgctgcgccctgtaccttgcttctcgcgtatctccaagggggatcggcgtaaatgattttgtatttcttcatctgcacccccttaatgcgcgctgaatacggattttgcaaggcttcccgttttgaaaagcgtaaaacacaagaggacggtatagcccatgcaagaccagatcgcgccggatatgtcatcggttgctgcgattgtctgtatcaaaaccgcataaataccgacgcacacaagaattagaaaagcctgaaaaccgagggcaagcaaggattttaagtagttctgtcccatgccgccccattcacgatttaccattgtcgcaacggggataggggcgatactcgttacaaggtatatttcaatcatgcgcccgtacaccaccagcatgatacagatagacaacgctttcatggtaagccccacaaagagtgattgaaaccatagccccaaaagcccgccgacgctcatagcgtccacctttgcttctatatcggtgataacggttgcaatatctatgcttgtgtcggatatgataacgcccgcgctgtcgttgacgacgctctgtgtaatgtcaaatacgcccatgacgatgttccaagtatttgttaccagcagcaccgcaacaaaggttttgaaaatccacttgaagaaaatccaagtgtcgagatcgtgcagattgtttttctcaattacaagctggattagttcgtagcacatgacaaaggtaatgataacgcccgcaatcggcacaatgacgttttccgataggctgcgtatcatattgaatatgcccgcgttccacccggcgggggttgtgccgacttgcgttgcgatttctccaacctctgtatttacgctgtcgaacagcccggagagattagagagtattccgtctgtcaaaatgccgcgaaaccaatcttcaatcatctgccatatcaaaagctaatccctcctttcccgcgccctcccgcgtgaagcgggagagcgcggcgggtagtgttagtttgtggcattatccaaacaggccggagagcagcgggacaagggtaaggccgataagggcaacgccgccgcccgccatcaactgtttcatgccctgcgacttcgcgccggggttatcgttgccgtacccctccatgaggttaatgccgccccaaatgccaagtcctgcgccaagcgcgattaccaaagtctgcaatacgtcaactgcgctgttgaaaaaatccatataaacctcgctttctgccgctaaaacggctcaaaaaatgttgttggaaataaaaatgccgccgtttttattcggcggctgcgtcctcgtcggacaaatctatttcgtatatgtcaaagggttcgtcgggctttacgattgccggacgggtggacatataccgttcaacgtcaaaagcgtttttcttgtcgaagtcggaaaggtatttgtagttcgggtgctgcgttatatcgtacttatcgctgaaaaaggggcgcacgccgcgcaactgcaaaatacattttcctccgtccataactgcgatttcgtcctgtgtcatcaactctttgccacaatgtcaagtgatgaattcaaagatgcctcattattccacaaaaaaggacggaagtgccgtacaggcttcttccatcctcatgtcatactcccacctccacctaaggtggcacaaggagtggtaactatgcaggttcctgctttgtggtgctgatcgcggcgctgttgtacgacaggaaatttgaataattctggggcatagaactccgccgcaaaagcggggagccctctgtttattctgcggctataaaccgctctctttagatgaaatgtatgcaatacaccaaatcacattttacctattgactttttacaacatctcctgtatcctataaaacaacacgtcaaagaaaggaattggaagatcaaccatggacgacgccgacagtagcgacgctgaccgaagtaacacttattgtaaactgaatacgtttttatatataggcataacctgcgtctaagcatttagatagcaggctatgcctttttgtatttctttttgctgaccaccgctgaaaggcggtcagaatataaattttatcaaagaaaggagtgattgatccattatggatcgacacagacagacgccttggcacgcacggaaacttacggaggtctatgaaactttacatacctccgaggaaggattaggtgacgccgaggctgccgaaaggctgaaaaaatatgggcgcaatgaactgcgctcgaaaccgcccaaaaccattctacaaatgctgaaagcgcagatcattgacccgatggtacttatcctcatcggcgcggcagctttttccgcaattttacaggagtggacagaggcggcggtaatctttattattgtaatcgtcaacgccgtcatcggtattgtgcaggaaaagaaagcacagtcctctctggaagctctgcgcaatatgagtgccccaacggctcgggttttgcgccagggggaggagagcgttatacccgccagcgagttggtagtgggtgacgttgtgatgcttggcgatggagatatggttccggcggacttacgcctgatagattccgccaatttgaaagtgcaggaggcttctttgaccggcgaatccgtcccttctgaaaaggaagcagaagatattctgccagaagactgccctctgggtgaccgcagtaatatggcgtacacctcagccattgtcacatacggacgagcgactggcgttgtagtagccaccggcatggataccgaggtaggtaatatcgccggtatgctggataatcaggacgatacggatacacccttaaaacggaaactgaatgcggttggtaagactctgaccatcgttggactaatcgtctgtgccctgatctttgccatcggcgctttctatcagcgcccgctgattccgcagttcttggttgcaatttcgctggcaatttctatcatccctgaaggtctgcctgccacagccacgattgtgatggcgctgggcgtgcagcgtatggcaaagaaaaatgcgttgattcgcaaattgcccgcagtagaaactctgggtggtgcaactgtcatttgctccgataaaaccggtactcttacactcaataaaatgacggtaacacatattgcagtcaacggagattttgaaaacggcacaactaccccgattggaaatgccgccaaacagcatcctgcggtatatagagaattggtttatgcagcagctctctgtaatgacgccagccttgacccagatagaaagggagaaatcatcggcgaccccacagagggtgcgctgatctatatggcacaggcgtttggaatcgaccatgaagccctggaggatgaatatccccgcttttttgagcagccttttgattctgagcgtaagaggatgaccactgttcaccgcatccatgagaagtgggtttcttataccaagggtgcggtggatgaaatgctacctctgtgcacccacattctgacttcggaaggtgtgcgacccatcacggaggctgacaaagaaaacattacaaaactttgcctatccatgtcggaggacgctttgcgtgtgctgggctttgccatgcgtaccctcacggcactgcccacagatgataatgagaatgtggaatttgacatgacttttgtgggtgtgaccggaatgatcgacccgccccgaaaagaggtggccgactctgtacgcacctgccgtcaggcgggcatccgaacgattatgatcaccggcgaccataaggtgacagcccttgccattgcgaaagagctggatatttaccgagaaggcaacaccgtcatatccggtgaggaactggatacgatgacggatgacgaattggacgatgcggtaaaaacaacgactgtcttcgcccgtgtatcccctgcggataaactgcgtatcatccagagtttgaaacgcaccggtgaagtagcagctatgacgggtgacggtgtcaatgactcccccgccctgaaagcggcagacattggcgtggctatgggtatcaccggcacagatgtggcaaaagatgctgccgatatgatcttgctggatgacagtttttccactattgcttatgctatcaaggaaggccgccgtgtctaccgcaatatccagaaggtaattcaattcctactggtaggtaatattgcagagattttaactctgtttgtagccacgctctttaactgggatgcacctttgttagccgttcatattttgtgggtaaatctcgctacagctacattgcctgctctggcactgggtgttgatccggccagcaagaatattatgaagcataagccagtaaaatcaggcactctgtttgaaaaggatctggttcgccgggttattacgcagggtatctttgtagccgccatgaccacttgcgcttactggatcggcgcagacctgggaggtcatgtgactggtcagacaatggcgttctgtgtgctggccttctcgcagatgcttcgcgcttttaatcagcgctccaatacggagcctatctgggtgcgggcagaaggaatcaatccctggctgatactttcttttgttgcatctgcaatcttgatggcgtgtattctgtttatccccgcactgcaaagcgcgttccagttgaccctgttgaatggaacacaatggctggttgtcattgggttgtccttgatgtcgattcttcaagtggaaatcacaaaatatgtgaaacgaatttatacaaaggctcgttaaaatattcagcagtaaaataaccagcgttgattgtttttcctgcttttgcaaaacaaaagccctccccgtcatggggagggcttctctgtctttatgctgcaatctccgggatttccccgacaaagttatacacgatcctgacttcctgcaccttctggccgtccaccttcttgacctcgccgatcaggattttactgataagccggttcagcactgcctcatccagttcctcgatggtggcatagcgccggatttccttgatgaaggtgcggacttcactctcctgggtatccgcccggctctgcatcattgccaggtcatgcaggcgcttctggttggattcctgctcttgttccagcgccgccgtcagcttcacaaaccgctgctcggtcaggatgcctttggccttatcggtgtacaggctcagaaacatcccgtcaatttcctgattccgggcttccagccgctggcgttctttctccgtctgagaagcgtccaccagataccggcgctccattcggcggctgagccgctggtagaacgcatcggcgtccttcatggcctgcgccgccagttcctgtatatccttcagcaccagattgtacaaatctcttgcctcaatcttgtggctggaacagaccttgcagcccatccggttgtaggtctggcagatatagtacgccttatcaatcggctcccgcatctcgccggtgaagcgattttttccggttcggcctactttctcataccgcacctgcatggacttcccacaggtggcgcagtagaccagcccgtggaacaggttgtagaagggacaggcattgcctttcataatgggtggcttgcggtcaatgagttcctgtacctgctcccattcctccggcgttacaatggcctcatggcagccctcgatcacttcccactggtcacgggggataatgtcataggtgttggagcggatgcccttctggtgcgtccgaaagaccagatgtgcgcctttgtagaatggatttctcaggatgtggctgattctcgccccgccccaggaataatagttggcgtcaaactccgtgttggccttgacatgggtgatggggattttttcttccatcagccgtttggaaatcctcatacagcccagcccgtcaagggcatagtcatagattttacggatgatcggcgctgtctccgggtcaatgatgagatgccctttgtcctccgggtcacgcatcagtccgaagggcggcgtccctccgcagaactttccctgccgggagcgggtcgtgatgcctgccagcaccttttttgaaatatcccggctgtacatatcgttcaggatgttcttaaaaggcgtgatgtccatctcctgacgggtcaggctgtctacgccgtccgtgatggcgatatagcgtacattgtgtttggggaaaaagatttcgatatagctgccagcttcgatataattcctgccgagtctggataggtctttggtgaccacgcagccgatcttccccgcctcaatgtcagcgatcatgcgctggaaggcagggcggttgaagttgcggcccgtatagccgtcatccacataatactcatactggaacatcccatgcttttctgcgaagtcccggagcatgagtttctggttgctgatgctcatactctcattgtcgccgccgtcatccagagagatacggcagtagagagcggtgattttctcatagacttgttttttcctgctcatagcgttctccttctatgaacagggacacgataccattatagtaccatgtccctgtccctgaatcaaccgtttttacgcagctttttctgccatttcccgctgatgacgccattcctcgaagtgttcgcaggtctggcgctcaatgagctgctcaaaggcttcccgcatggacttctccccggaaaactcccgcaccaccacgaaacggactttattcttctgatttttgcttttttccataggctacctccatagagtagcaggccagacggcagcaccggcaacgaagtccggcaacgaacctctgaaaacctgtaaactaccgtctgagctgcaaatcttactttatcaattttcttgaaaaatctcgttgctttcgttgccggagatagagatagatattagaaaatgccttatttacaggctttttccgtatccagaccggaaaatccccggcaacgaacccggcaaccaggtggcaaccatcccggcaacagaccgccattttcaggcgatccactccttcggaagctccaactggcggcattcttcctcgctcagttccacaaatccatcttcgttgccgggcagttcgttgccggaaacgtcccgttcccagcccttctgcctgccgtatccggcgaacatcctcggattggagaatggcttccagcccgtcaccacggtgttcatgatttcgttgatattgtgaagctgccaccgcttcggttcgtcataggtgtggcccagcgcctccctgaaaagctgtttggagcagaccatgctgccggtgtagtgttccagaaagccctgtatctgcccggcctccgtgtcctccggcatgaaatccttctgcacctccacaagctgccgctggatggacttgctgaatttcatggaatagtgaccgctgcggtaaaccgtcatggcctctgcccagacctgcaacaggtaggctctggaagcgtcctcgtcctccaaaatgtgaacctccgcattctccgggtaaatcatgatgggaaggaaacgccggttcccggcccggtcaaggggcaggaagtccagcgtgttggaagaaccgccgaacacgcactgccgcagccggtctttgggctgagcctcgtagggtgtccggtaggtttccttctggcggctgataaacgagcggatttcctcaatgcttttggcgctgctggtagccagcatctccgacatctcgatgatccagtggccttgcagcttcaaaaacacccggtcatcgtccagttttttcaggtcatcggagaaccactcgtcccggatcgccagcaggcggaagaagctggacttgccagccccctgtccgcccaccagacagagcatttcctcgtatttggagccgggagaaaacacccgccggatagcgcccagcaggaagtgttttaacatttcctccacatagtcgctgacctccgcacctaagaagtgatggagacaggagcggatgcggggcgtcccgtcccacacaaggccgttcagcacgtcctgtatgggatggtagcagttctcattcgccacgatggagagcgccgccgtcattttcttctcgctggttaagccgtagttctgctcaaaatagagaagcagatatttcacgtccgtatccgtcagggcgctggtgttcctgcgccagcccaaatcccgcacgatgtccacccggtcagtcaggaggttcagccggatggcgtcccgcaacagcgggtcatggcagaacactgtccggcagttgccgatggtgttggcgggctggcccttttccgtgacagagaggctttcccgcacttcgtcaacgctctgctccggcgctaaggcttcggctgcgctcatggcggcctgccgggtggctggcggtaaactctgatattcgctgctcaatcttcctcacctcttttccatactcagcgaccacacaggcacgttcctccatgctgccggacagtagaatatccagcagatactccgtgtacggtttcttttgcagtgcctccacaaacagcgggttccatatttcctccggcgtctgcggggcatactctttctcccagcgttccagcaggtgcaggtaatcgcacagcacccggaaacatttttgttccgcctgccggtagcgcagttcctcgctgatttttctcttgaccggcctcctgcggggcgggtcatggcctttggcgtcatagcggacagagaaatcctccgccagcttcaaggccgcctctttcttgttcagcccgaacagacgggcggtaaaatcaatcacatccccgtccgcctgacagccgaagcagtggaaccggcggtcaaccttcatgctgggatgtttgtcatcatggaagggacagcaggccatcccattcctgccgacctgcactccgtaagattccgcagcctgccttgtggggacagcctgctttaccgcttcaaacacattcgattttctcacctccagacagagaaaaaggcacccggtttccgcaggaaatcagatgccttacaactccatatcctgtttctttgtaggggcgatccgcccctcccgttcccaacgctcccggttatcccgatcagcgttgatctttgtctttgccagcatatccataatggattctttggcgttcttcttgacctgctccttcccggcctgcttgacttccggctgcatcagcgtccgctggatttttgccagagcgtgctgcatgacccgcttgattttgttgataacaccatccagacgggcggcagcgtagtcacgctccttctgcggggccttgcgttccggcgaaagcacccacgttttcgtttcctcaatcaaacgaatatcttccttgtgcgtctcctgccggacggtatcggtcacgacctccaccgccttgtcataggccgcatcggaaacatcatctaacagagtctccacgtcctcgattttgagcgtcagttcttccagcttctgctcctgcgccgcaagctgctccttctgcttcatcaggatataatcctgtttttccagatagtcccgcccgccgtaagacggctcctgatccagatgcagtccatgccgtctggcgatgtcaaacaggagcgtccggcagaccgcatcaaaggtctgcttgcggttgttgttccggcctttgggcttctccgggttggggagagggatgccaagttcttccagtgccttttcctgctgggggcacagttccccgtagcggttctcacagtcaaagacgtgccgctcatggatgtggggcgtcccctcgtccagatggagcgcccagtctaagatgtggatatgggaaccgaagcggcgctcaaattcctcataaaactcattgacaatggaaaagagcgtgtccggcgggacggattctcccatcgtgccgatctggtagatgctttcctccgggcaggtcttgttgtttttcagcaagtcctccacagtgcggttgcgttccgtgtgccgggttttctcattccgggcgttctgggcctccacatggccgccgtaatgctcgtagtagtacatccgctcgatttcctcaaaactgaaatccggctgctccgggttctcccggaactcatgggtggtaaagccccggtagcagtcccagtagacattttgccttgcccgttctgcgtcaatgtgttcgctgttctccacatcaaaccggcggtcattgtggcggggattataggtgccatgcttgccagagcgcccattgtgtcgtgtcagtttcaaacagatttcctccttcctgcgaagatgctgcggggccggggaagggcggcgaagccgcaaatcctgcgaaagtctgcgtcaggtaatacccagtacgagttgacgcaggcatcaactctccctgggcaaggcgtttcacccttgacccgatggggcggctgccctcaacccgccaaggcacttcgtccttgacccgataatggctgccgcccttaacctgccaatgggcgttgccccttgaccccagcagtgcgctgccgcccctgcaccccggcacaaagggctggctgccctctgtactcccgcaccggcgaagctggcttccaccgcaggagcggcgtttgccagtttcaccggctccgtatccgcacatttgcgcccataggcggggagtggatacggaatacgcctgcggggattgccagtcaaaacagcgggtgcagacccggcattttgaccgtaatcgccccgatttcaagcgattttttcttccgctcccaccacctgaaagccatgctcctttgcgtactcccttgcggcggctttccgttcctcgctgtacggcggcaccagccggatcgacagccgggacttgtccagcacataggtcacgctgccctccggcgtgctgcgctccaaccggcacagcagcgggtatttccggctgaaatcagccagcctgcgcttcaagctggcgttgaaggtgtagatgctggcaaggttctccgcctcgttccagttgatgatagtttctttctcatacttagacagcttcctcatacagatcctcctcataatcagtgtaagatttcagcacacgcaggctgcgcttgagacggcggtactcgtccatctccatccgcagatggtggtaaaaatcctcgtaccagctttcgcccacctccgtctccaccttccggaccagccccagcatccggcgtttggcctccgggtcaaccgtcagggccgtcagccatttcagccgtgtcaccgtattgtggtggctgggacagccgtaagcgtagagaatcttcttttctttcatactcagtgtcataatgatttcctccatttctttgctgcggagccatacgccccgcatgataaacttgtttcctgtccgccggtctgcctgcaagccgctcctgcccggaatttctcccggcgtatcggcctctttggtgcgctcgatttctgtcctggcgtcacttccccggaggccataccccttgcagccggtcattcgattttcaaggttctgtgcctgtctgcaagaaccagtttaccgaaaaaagaggccctttcccgtatatccaaaacgtcggaaaaacgcttgaaatccgcatatttccacgcttatggaatcgtgctataatgggtgtaatcactgaaaaacgataacgagagagggggctttggatgtacgcaaagctgacaatcccggagcggctcaaagacctgcgggtggtggacaagcacctgacgctggaacaactggcggagcagaccggcctgtctaaatctgcgctgggaaaatacgaaaccgatgactacaaggacatcagcccgtttgcgattgcaacgctggcggacttttacggtgtgtccaccgactatctgatggggctgacggaaaataaaaatcacccaaacacagaacttcaatctctgcatctgagtgatgatatggtggaacttttgagcagcggcaaaatcaacaaccggcttctctgcgaactggctacccacccgaatttccggcggctgatgatagatatggaaatctgtatcgaccagatcgccaatatgcgggtggagcagatgaatctggtgttggaggccacccggcagaccgtcatgagcaaatatgcgcccggagaagatgacctctatatgcggacgctggaactggggcaggtgcaggaaagcgatttttacagccacgtcatgcacgatgatctggacagcatcgtccgggacatccgggaagcacaccgcaaggacaagaccaccgccgacccgcagcccacgctggatgatgtgaaggaaaaatttgagcaggccatagggcagggcagcgatacagaaatgctgatccacgagttctgcgataagttgcagataccctttgagaagatttcctcggaggacttctcagcgttcctgcggatactgagcctgtccaagcagctcaaaagccccaacaatatgagaggaaaggccagtcccatcccgcccaaccgcaaggccagacgtaagcggaagtaaaatttccatatccgggagcggcaaaaaagccatccgccggttgattggcaaatggctttcgtgaagctgtattctgttgtagtggttgttcccagtttgggaacagccactattgaagatgctattctttgtctttctgcgacacctgcgtatgggcttcctgctggacaagcagccccgccgaaaagccgtatttgaagtggctttcgttttcctcacactgagcgattgccacctgcgcccgcagttcttcgaccagtgcatagtcctctttgctcagacgctccgataaggtgtccatcagatcggcgctggccttgactgcctgcttgaatctcggtgaatcagcgaccaccgtttcacagggataaaatctgccgttaaacatttcttccagtatcatgcgcccacctccctcagacaaaaatcatctcagagaggatgatttcctctgcccggctgcggatgctgttcatacccccgacccatgcaagctggtcacgggctttcagttcctcggtgacgccctccgcctcctgcatctgcgagacgatacacgctagccggtcaacggcctgttcgttcaggtcagcaagatatgtccagagttttcccgacagaagcagggcgttgtactggccgggccggtgttcttgcagaaacgtcttgtgcatccggccccacagtccgatagggcggctttcctccggcagcttcagatcggggatgtagtagtctcccaccagcgtgtagctgatgccgttttgatggattttctttggtaaatgctccatattcgacctcctgtattcagttttttcagaatccagttgatcgtgtccctgttcatgataaattcaaggcaactgaactcttcacgaacaagtatggcatatcctttcccaatttctgataattgaggccatgagaaacctgcgtgccgcgattttcggaagtgttgaaactgtcgattgtttcacgtcccaagttctccgaaatatcctttgcatttttcccgcgccctcccaaaaacaaggtgctgtcggcattgtcaagtatgatttctgccgcgtccttgtaaatggcttttagctggctctgcgattgcagaatgatagaagccgagatttcccggctgcggattgtggcaatcaatttttcaaactgcgggatttgtccaatgtttgcaaactcgtctaacaggcagcgaacatgaaccggcagcttgccgccgtattcgtcgtcggccttgtcgcacaagagattaaataactgcgattgcagcatagcgataacaaaattaaacgtgctgtccgtatcgctcataatcaaaaacaaagctgtttttctgtcgcctaacgtgtcaagttctaattcgtcgtaggacataagatcgcgcaattcctttatatcaaaaggagcgagcctcgcaccgcaagaaatgaggattgattttgcggttttgcccgccgccaatttatattttcggtactgcttcaccgcgaaatggtcggggtcgcgttcttccaagtcggcaaacagcaaatcgacggggctttgatattcctcgtcgtcctcgcgggcttcgctggcgttgataagttccaacagggtaataaagttcatttcctcggcgggggcttcgtaccagatgtagcccaccaacgcgcaatacaaaagccgttctgcctttacccaaaaatcctccgcgcttttttctccctcacctttggtattcgctatcaacgtatttaccagcttcaaaatatctttctcgctgcggatatacacaaaggggttgtagtgcatagattttttgaagttaatcgtattcagtaccttaatgcggtagcccgcccgttgcagcagcttcccgcactcaatcaaaaccgtacctttcgggtcggttaagacgtaagaggaatgaagctgcattagattaggtttgacaaaaaatcttgtttttccgctgccgctgccgccgatcacgacgacgttcttatttctcgcgtacttcggctgcttcgggcggctgttcatggtaagccgttccgtctgcgtcaaaatgatgttgttttggaaatccgggtctatgtagggctttatatcttcggcgtttccccatcgggcagagccgtactccgcgcccttgcggtatttcttcgcgtttttccctttgacatagactatcaagcggataatcaccgcaccgacaatgccgacaagcaaatccaacgggtaaacgctcggcaaggcgttttcaaaggctgcggaaaatccttgtgtgatattcagtatctttgcagaaatatccgcgccgggggcaagccgcaccgcctgtccgactttatcaaagagatagacaaagaacacataggggatattcggaagtatcagctttttgtagttgatctgcttcatatctcgcgccccctgtccattttctttaccttgtcgcgggcggcgttaagctgcttcgccttgtcctttgcagcggcaagggctttgcggatagagggctttttctcccggttcagcttctttgcggaaaactcttgaaacgctgcggtcataacgtccgcgtcccggcctttgaaaaacacaaggtaacgggtctgctcgcccttaaccttttttagcgaaaaatctatgttgtatttcttcgccgtactctcaaaggctttaatattgctgtcggtgatctcgatgttggaaacacccgcgttctgcttcataagctgccgcatggtctgtttcccatgcgcgggtttgcttttctgctccaaaaacttttggattgctttctgtaacgcctgttcggtaagccgcgccgcgccttttcccactttgacgtatagggcaatcgttttttgggttacttcctcctgcaaggtatcaactcctttcccggtaaagtgcggctatgctcattcgccgccgtataagtcgtgattgacaagggcggtatagtagctgtcaatggtactcggcgcgttgaacagcaccgcttttagatactgcttgatgttgcgcactttggttgtgttctccctcatgcaatccaaaacaaactcaatatggctgctgttcagcttcaaaaacttggatttcaccaattcggcggggtagtcgtccccggcaatacggattgtctttcgggctgtgcagacggtttccagcataaggtcaacaatctcgtccaaacggtctttgtcaattttgcagttttgaatgagatggtcgtattcgatattgtccttgataatctccctgtaaatctctactgcgctattgcttttcgcttccgttcttttcctttccggcggcgtagccgcttcgccatgcgcaaagggcaaggggtttagggaatggaaaggaatggaatcggtacttgataaatcagtaattgattgttctttacttaatatatctttatttaattgcgttggattttccaacgtaggtttttcctgcgtaggtttttccaacgttggattatccaatgttggattttccaatgtaggtaaatccaatataggcggctgtccgccgctggtagctgcttccggctctcgcggctgcggctgctcgtatatgacgtaatctgcgccccgcaagcgtcccttttcgtcgcgctcccggctgcgcacgatatatccggctttttcgagttcctttaccgcttcgcggattgcgtcgatcttctcccggttgatatgggataagcccgcaagggtataatcccaatcttcgggcagcgaaagcatttgcgacaacaagccctttgcctttaaggacaattccttgtttcgcaagtggtggttgctcataacggtatatcccgtatttcgctccactctgaaaactgccatatttcctcacttcctctcttggtatgcgtggacaattagaaagccgttttcggctgttttggtattgcaatatgccctttgccgttttcgcgtctgcaaagccgcatggcacaagggcttttgcccgtctatttgtccatgctggcgtgcgttttccgcgtccttttgccggggcaatagggacactctttgaaaacgcaaaactcatatttccacccggggcggtagaaacggcaagtgccgcaatcttcatcatctccggcacaaccggattgatagcggtcaaatcccggcttctgctgcatgagcaattcaaacgcccgctgcttgccctttgtgaaatacattccggctgcacctcctttcctgcgggcataaaaaaacggcgttactttctcccccaaaggggttaaggtaacgccgtttgtgtgcgtattcagtttttaacacattccctgtctatccgctgtccgcaaaaccattgattttattagctttttgccgctatcgctatcacacctcattattccagcggcccggatttcaagccatgcttgcggacattgaagccgggaaagtgggtacggtcatcgtcaaggacatgagccggttagggcgaaactacttgcaggtagggttttacacggaaatgctgttccctcaaaagggtgtgcgttttatcgctgtcaacgataatgtggacagtgccagcgagggcatggacaacgattttaccccgctgcgaaatctgttcaatgaatggctggtgagagatacgagcaagaaaatcaaggcagtgaaaaagtcaaaaggcatgagcggcaagcctgttaccagcaagccggtttacggctatgtgatggacgaggacgagaattttattatagacgaggaagccgccccggtggtgcagcagatttaccagctttgccttgccgggaacggcccgaccaagattgcccgtatgctgacggagcagcaaatccccacgccggggacgctggaatatcagcggacaggcagcacccgccgttatcacccaggctatgagtgcaaatgggcgaccaacaccgtcgttcatatcctcgaaaaccgagagtacaccggatgtctggtgaacttcaaaacggaaaagccttcttataaggtcaagcacagcatagagaaccccgtcgagaagcaggccattttcgagaaccaccatgagccgatcatcgacaaggaaacatgggaacgggtgcaggagttacgcaaacagcgcaaacgcccgaaccgctacgatgaagtggggctgttctccgggattttgttctgcgccgactgcggccatgtgctgtatcagcagcggtatcagaacaaagaccgcaaacaggactgctacatctgcggcagctacaagaagcgcacccgcaactgtacggcgcactttatccgcaccgatctgttgaccgctggtgtcctggcaaatctccggcaagtgaccgaatacgcagccaagcatgagagccggtttgtgaaactacttgtccagcagaacgagatcggcggcaagcgaaagaccgccgcagccatcaagcagcttgaacaggcgcaggaacgcatttctgaaatcagccgcattatcaagcggctgtatgaggacaatgtaaacggcaaaatcagcgatgagcgtttcatggaactgtcggctgactacgaagccgagcaagcggagctgaaaaagagagccgccgccctgcaagccgaactggacaagtcacaggcagctaccgtcaacgccgagaaatttatgggcattgtccgcaagcaccttgcctttgaagaactgacccccactctcttgcgggaaatgatcgagaaaattgtggtgcatgagtgcagctatgatgagaacggcacccgcaggcaggacattgagatttattacagctttgtcggcaagattgacttgcccgaataaccgcccgacctatccgacacaatggccaagtgtcggataggaacggcaaaattttttgcacttctattgcttctttatcacacataagcaaatgcggagggattgtttcggttcatgattcggagtgcagcgaatgcgggcggacggtcaaaagttgaccaaaaatttttaaaaagcttcttatcaaagccgcttttgcggctttttttactttttatgggggaaactaaagaaaaacaaaggaaaaataacgaggggattttatgcggaaaatcatatgtaacctggcaatgagccttgacggttttattgcggacgattcaggcggctatggctggataaagggggacggcagcaatgcgtgtgatacggcgctcaaatacgacttcagccggttcttgagtgaaatcgatactgtcgtcatggggcgcagatgcttcgaccagggaatgcatcgggattttaaggacaagaaggtctacgtcgcctcaaaaacaaagcgcgcggatgaagcaaacgtgtttttttcagacgatatctgccgcgctgtccttgcggagcagcaaaaggaaggaaagcatatctacctgttcggcgggggcgaaatgctcgacagctttttaagggaggatataatcgacgaatatatcatcggcatcatccctgttattttgggtaagggcaggccgcttttcctgcacggcacgccacaaatagccctgcgcctgcatgattatttctttgaggatggtattgccatcctccgttatactaagaaaaagaaagagcaatcaccggaaaaaggctgtacccgttaagagtacagcctttccctttgctgttatttggttttataaggaggaaagtgcgtgaaaggacgcgcggagcgcgggataaagcgaactgtaaaccgtgtggaaatggctgtacagctccgtgttttgtatatccggcacagcacccttttctttttttacaaagacattgcaggcgtcctgcacgctttggaacatcccgccgccaacggcggccagaattgccgcgccctgtgccgcgccctcattgaggcggacggtcgaaacggggcaggcgaacatatcgcagagcatccgcttccataccgggctgttcgcgccgccgccgcacagcgtcatatcgtccgggcaaatgcccatttcctgtaatatttgatagcagtcgagcagggaatagcccacaccctcgagcaccgcgcggattaagtcggcgcgtgtatgcatggcggaaaggccaaagaaaacgccgcggcagtcggggtcaaggtgcggcgtgcgctcacccatcaggtacgggaggaagagcaggcggtttgctccaacggggcttttttccgccatatcgtccatcaggctgtaaatgcttttcccgtccttctttgcctgcgcgtgcagctcagggcaaagcccgtcgcggaaccatttgagcgaaagccccgcggcctgcgtgacgcccatcacatgccatgcgccgggcacggcacagcagaacgtatggacgcgccccttggggtcaacatgcggttcgctcgtatgggcgaatactacgccggaggtcccaatcgttgtaaacgcgcgcccgtcacagacgacgcccgtgcccacagccgccgccgcgttgtcccctgcgcccgcggccaccctggttccggctgtaagcccggttttccgcgcagcctgttcgtctaccgtgcctgtaatctcgggggattcatagagcactgcaagcatgtcttccctgaggccgaaataatcgagcatttccttcgaccaacagcggttcttcacatcgagcagctgcatgccggaggcgtcggacatatctgtcgcgaatacacctgtcagcttgtagcggatgtaatccttcggcagcaggatatggcggcattttgcgaacacatccggctcgttttccttcacccataaaagctttgcggccgtaaagccggtcaaggcgggattggccgtaaattcaatcagcctgtcgcgtgtaaggtcatgcgtcattttgctgcactgcgcgccgcttcgctggtcgcaccagatgatagcgttacgcaggacgccgccgttttcgtcgagcagtaccaacccgtgcatttgcccggttaggccgacggcctctatttcgccgcgccggacacaggttttttcaagcagccggcggatgctcagggctgtcttctcccaccagtcgtcgggattttgctccgcccagccgttttgcggctgataaaggggatattcctccgacgagctgccgagcagctccccgtcctgtgagaaaaggacagtctttacgccgcttgtacccacgtcgattccaattacatatttcatcctgcaccatccttcattataagcataaaagcgcgtggcgtatttcagaagtgctggtaagcaccctgacttctattttcacgcgctttgttttcccaggctggaggtacctcaggcttccgtctttttttgcctgcgccctgcccatgacatggcaggtgcccggctccagcccgagcacatactcgccgcttttcatgcatttccactgggtaaagaaggggagggcttccgggtcgtaaatcagctccacacccattttcagctccttgttcgcaagcaccacatgcgcccttttgtccctgccgggacgaattttatggaagaaaacctgttccttcgcgccgtctatcggctcggaaatacttaaaagctccgaaaggccgctttccgcctccttgtcgcgcggggatacgtcgtacgacgggatatgcagctcgcacgcgggggaaagcagcggatagccaaagttcatatgatacaaaagcatcagcggcgtgggcgcgaaatcgaggttttccacgtcgtcttctatgataaagctgttttcttccccgtttaatgtcacgcgcctgctcaaaaccacatgctctccgaacacgcgcgcctctttgaccttgccggaaacggtaagcagcggcttgccgccttcccatacggtctcggggcatacctcgtaagcgggcgtgttcgatatgaccccgtgcaggccgagcggctcgccctcatccttacaggcgccgcccatataggtaaggccgccggttgtcaggaagccggcaaaaaagccgcggaaaaagccgcgcgcgccgtcctcggtgaaatatggggaagcggtaatccctgttttagaaaggaagctcaggttgattcctttgcatttcaggcttgaaatatccatcccgcggccgggcagaacggtaaccgaaagccccgaagcgttgtaaagctccacggcgcgcgtaccctgcgccttgccgccctgtaaaacgcagtcgcgcacgccgagcacctgctccataccgccggtttttctgaaaagcgtttgtttgtccatttgaagtccctcctgtcgatgggggcatgcggataaaaagcggggcagacctctttaaagtctgcccccacatgcgctaaaaggcttctccaacgaggtattgtaaatcaattggcagcctattgagaatgcgaacgtcacggccgaatttaccggctgttttttctattacgatataatcaagcccgggaatcacgacatcgtcccatgtcgtccggaatccctttagcccgacgtcgagcatcaaaaccatgcgctgcgcgcatttcctgtcaaagtctgtcgatagggcgccgtacatttcctggcattccgtatagccggaattatgggaggtgacatagccctttaattcctcaaagcccggtaatttcaggcccgctgccctttcaagctccggcgcttttgcgcggtagaaatcaatcatggccttttcatgtgtacagccgggcaaatcgtctttggcaatttccctgagcttttcgacagaaaactcaaacgcttcctgcaaaaaccttgtccagatacggtaactgtctgttacaagcgaagggtctttgacgcacatgacggaaatccgctgcgcgccgcacagcccgtcgcgcttgggggatacgccgatatgtacgacgtcgccctcctgtatgacgcggttggaggccctcgcgacaatcgtgcggttgttgatgccggaggtcaccatgaccttgaagcccatttcctccgcgccgagctcgttcgcgatttcgtagccccagccggctacctgcgcttctgtaaggccggggcgcaggatacgcagcataccctcgagcatggcgtcgctgataaggcagctctcttcaatcaggcgcatttcacgctctgatttttcgtacttgatttcatagtatttttgagatatgtcagcaatcccttcctccccaacatagcgcttcaatacgttataaaggccgagagggaaaacggccctgcttgtcagaagcgctatgctgcgcggcttttcgccgcatgcctcctctataatatcgataggggacggcaggttcggaggataatcaggattgtctacctgcaaaatatcgaccttccggatttttacgccgctgcggtggcagaattgctcggctacaataccgctttccaatccggcgataaagtacaggccgttctttgcaatgacagccgcggcaggctctacaatcatgttgctgttgccggcaaggtagggaacgtcgccgcagtagtgctcgtcggaatatacgacgccgcagtcatagccctcctgctcgagcatccgcatgaccttttgctggcgcatggtaaattcctcaggcggaaggtaatagcttttgtcaaacgacggggcgttttcaagtaccctgcagacaatttccgcctggcgcttccaggttttgctgtcaaacatgggtcacgcctcctttgctatttccggcgcgcgtttgatgtccgggttggtaaacacgtcctcgtcgtcaaagctcggcgtggagaattccgatacgaccgcgccctcattgcccgcctggaaccagtggcgcgtattgattgggatggtatactgctcgccgggttttaagacgatttcatggaataccgtgtaatactgccggcccgtctgcgggaccgttgcttttatatccggcgtaggcgcgccctctacataaaggtacaccgtgccgaaacggcagcggaaggtttcttccttgccggggtaatcgccgaacgggggatggcggtgctccgggcatgtctggccgggcagaagcaccatttcctttgcgcagacgcggtctgtgttgatataaatcactagctgcagcgcgcagtggtcggggtcgcccagcccaaaatccgcaacctctatgttcgccttttctttttcggtcagcgcgatacccgccttatcgtaataatcgattacctgtgcgcgtaatgtctcatacttttgtcttgtaatcatagaaatcattccttttctttagaaatcccaacccaatctatgatgaaattcgcatatacctcaattgcctgataaaatttttccgcgctcatgctctcgtccgtaatatgcaggcagtccaggtcgccggggcccatgatgatgacgggcatcttgccgatgttggcaagcggcgcgccgtcgcatccgcagggcagtccgtcgagcgccgtgtcaggcagcacgcgtttacagctcttaagcgcggtctgcacgaattcgtgctccgagggcgtttcaaagcagagcgtttcctgataccagtcgattgtgacgggatggtccttgagccagctgtcgcccatgcaggcaagcgttatacggtcctgcacctctttttttatgtcttcaggctttacgggaacgagcttgtaatccgcatcgtattcactcggcaggaattccacgtcgaacttgacgttgcagctttccgccacaacggaagcgccgctccctccgctgatttgcccgatgttcatcgtggggttttggagcaggggatgctttttcgtcatcagccactcggattccagttctttcagggcgtttatcagcttatatgccttttcgatggcgtttacgccgatgcccttggtcgccgcgtgcgtctgcttgccctgtacggtgaactgcgcaaggaacgcgccgcggtttgtcggcatgattgccatatgcgttggttccatgataaccgcgccgtcggccctgtagccgcggtcgcagcatgcgatggtaccgttgccgccgccctcttcgtctatgaccgcttcaattacgatgtcgccggcaagcgggacttccagctcctttaatgtcctgaccgcgaggattgccgccgcaacgccgcccttcatatcggtggtgccgcgcccatagtaccggccggcgcgctctacgcattcaaacggggggctttgccacaggctttcgtcgccgggtgtgacaatatcgcagtggccgttcataatcagggatttgccgccgccgctgcctaagaaggccgcgcatacgttttccctgtcctcataggtgtggttcgggttaaagccggggtatttacagattttttcgttgtcgggtgcgaacgcatcaacgttcgcgcccatttctgcaaagtgttttttcaggtattccatgattcccttttcctgccccgttttgccggcgtcgataatccggctgtcaaacgaaaccaggtccttgaggaaatcaaagtagctgtctttgtttttttctatcgtctcgtggatttttgcccttaaatcatggttcattggttgattcctccctttctaaggggtccctgcggttacgccgctcccgctgatttggattttttctggaccgcgaccgcgaggataagcacggcgcccgtcagaatcatctggtagtaacggcccacgccgatgaggtcgaagccgttgctcaggacgctcataatcagcgcgccgataaggcttccgacaacgccgccgacgccgccgtttacgcttgcgccgccaatgacgacggccgcgatggcgttgagctcaaggccctggcctgccatcggctggccggaatcgaggcgggaagcaaggatgatgcctgcgacagacgccatgaggccgctcagcatataaacgccgaccttcgtgcgcttgaccgggataccggcaaggcgggccgcttcttcgttgccgccgatgccaaacaccgaagagccgaacttcgttttctgcaaggtaaagtgcccgattaaatacatgagtacgatgatgataacgggaacaggcaggaagcccaggttgccgcgcccgaagatgtcaaagccgtccgcaaggccggaaacggaacgcccgccggtaaacgcgagcgccaagccgcttgcgatggtcatcaggccgagcgtcgcgatgatgggggggacgctcaatctggagatgataataccatttaacgcgccgattatcaggccgacaagcaggccgccgataacgcccataaatacgttcatgcccatgttgaccatcatgatggccgcaatcgtaccggagagggaaacggtggaaccgaccgaaaggtcgatgccgcccgaaataatgacgaacgtcatgccgactgccaggattgcgttgatggacgcctggcgcaaaatattcattgcgttataaagcgtggggaagtttgagctgccgaagcagaaggctatgcagatgaccgcaaggccgatgaaagcgacaaattcccggcgcttgattaggtttttaagctggtttttcattcgaatcgcctccggtaatgtagtgcatgatttcgttgatatctgttttattctgttccagctcggccgtgatgcggcccttgtacatggtgaggatgcggttgcttacccgcaggacctcctcaagctcggaggagatgaagatgacagccttgccgctttgagcgagctggcggaccgcatcgaaaatctcttccttcgcgcctacgtctacgcccctggtgggttcgtcgaggatgaggatatcgcagttggcgcagagccatttcgccagtacgaccttctgctggttgccgccgctcaggtttaagacggggaattcggtggacggcgtttttatgctaagcgattcgatgtgccgtttggcttcgtttcgctctttgttgctgtttataaagataccgcttataaagcttttcaggttgactatggtgatgttgcgcctgatgttgaggttcatgaagagcccctgcgccttccggctttcgggcagcagcccgattttacagtcgattgcatccttgggccggttgatatttttcttttccccgttgacatacaccgtacccgatttcatacggtccgctccgaacaaggcgcgcacaacctctgtgcgccccgcgccgacaagccccgcaatgccgagcacctcgccctttttcaggtcgaaggaaatgtcgtggataaactggttggatatgtctttgaccgacaaaatcaggccgtcgtcgattacggggtttggcgtgatttcgttgttgatgtgctcgcctaccatcatcctgatgatttccggcttgtctacatcgcatgtatttgcggtgccgacgaccgtaccgccgcgcagcaccgtcaggcggttgccgatgcgcgttacctcgtcgaggcggtgggagatatatataatagatacatttcttttctttaaatcctctatgatttcaaacaggcgttcgacctcctgtattgtgagcgtggccgtcggctcgtccatgacgaggattttcgcgtcgcacgcgagcgccttggcgatttccaccatctgctgctgcgcgatgctcaaatcaccgacctttgtgtaaacgttcaggttcaagtcgaaccgtttgagcaattccttggcctgcgcgtacacctttttccagttgatgacgcctgatttgccgtatacaggctccatgccgaaatagatgttcttcgcaacgtccaggtcgggcagcagcgtaaattcctggtagatgaccgcgatgcccttttgctttgcgtcgttcgggtttttaaagcgctgcttttccccgaacagcgtaatttcgccttcgtcgggcgggtagacgcctgccagcgttttaatcagggtggattttccggccccgttggcgccgaccagcgtgtgtatctcgccttcgttcagggtgaaattcacgttgttgagcgcaagcacgccgggaaaccgcttgacaacccctgtcatttttaagatttcttttgccataccgttttcacccccggttgccgggggcatgccggatggctccggcatgcgtccccagtgtgttgatgtttaccaagagaatcctgccgcgttgtccttcgagagcatctcgaggggaacgtcgatggtcttgtcgaccgtttcgccgttgtgcagcttgattgccgtctggattccgattctgcccatttccgcgggctgctgtgcgacggagccggcaacgatatcgccctctgtgatggctttgatagcgtcttccatgccgtcgatgccgaccgcgatgaccttaaagtccttgcctgccgatttgactgccgattccaccgcgatggagccgtagtcgttgaccgcgagaaccgcgtcgaggtccggatgtgcggaaaggatgttgtctgccgcgtttacgaacgccgttgtggagttttcgaccgcgttgatgtgctgtacaatttcgatatccttgtactttttcagcgccgtctcaaagcccgcggccctgtcctggaaggagctgataggagggccgtccaggataacgaccttgcccttgccgccaagcttctccgcgatgaattcgccgcccatttcaccggccgccttgttgttggaggcgatgaacgaagcgatatcgccgccgtcggccataacgtcaaggcagatgacggggatgcccgccgcgtttgccgcctcgacagcgggaacaatcgcgctggattcgaccgcgttcaagaggatgacgtcaaccttctgtgcgatgaggttttccacgctgctaatctgctgtgccgcgttcaattgcgcgtcgctgataacgacttcgacgccggccttttcggcttcttcctttacgccgcgctgcattgcctcaaagaaggggctgttgagcgtcatgaacgtaacgccgactgtgattttgtcgcctgagcttcccgaagagccgtcggaagaggacggtttgtccgagcccgcgcttgaggtgtccccacctgtagagcatgccgcgaacgagagtaccagtacgagtgccaacaggactgccaacatttttttcatcatgatttttttcctccattcctttaacaagaaaatgattgccaatatttagcaaaaatgaaatcgatgtcattttacggcaaaaaatgaaaccgactcaatttactgcatggttacgaaccctttgcgaggattcccgaaggaccagctcgacggggagcaggacctcttttgcaggctcctgtgagcccgcgatgcggtcgagcaggagggacatcgccgtggttcccatttcgtaggtgggctgcctgaccgcggtaatctgcggctggcagtactgcatccattccaaatcgtcgaatgcggcaagcccgatgtcctgcgggaccttcatgttcagttcggcgagcgccttgagcacgccgagcaaaatcatgttgttcgcggcgaagattgcgtcgcaccttgcttcctttaccagctcgatggtgttctggtagctggtgtgccctaagaaatcgccgaatttaatgagcttcttatcgatggggagcgctgctgtttcgagcgcctgctcatagccgtataagcgctggtagccggtggtggagatgttctggccggatatgatgccgatgcgcttgaagcctgattctatcagttttgtgacggcctcaaagctgccctcgcggttttgaacgagcacggtgtcgaacttgcccttgttttcgccctccggcctgcggtcgacgaatacgatgggcttgccgccggttaaggcgctgtagtcgtcctttgcgccggtactggcaagaatcagcccgtctacgcgcttgctgatgagcgcctggatgtactgcttttccttttcggcctgttcgtctgtattgcagagcatgatgttgtagcttgccttgttcgccacatcctcaatgccgcgcacgaccgaggtaaagaaggggtttaacacgttcgatacaatcactccgatggtcctcgtctcgttgctgcgaaggccccgtgccagctcgtttggctggtagccgagctcttccatcacacttctgacgcgctgcgccgtcgcttccttgacaagcgcgctgttattgagtacacgggataccgtggtttgtgagacattggctttttttgcgacaatgctgatgttgatgtttcccatttttttactccaattgaaatcgatgccatttttgccgacgagttctttctcttttcgacatcctcagtataggcctgcttgtgagatgtgtcaactgtttttcacaataaattttttatttgtgtgatttgataaaatagaagtgtgcgctttgtcgaaaaagcaagaataaattggaaaaatatgcaaaaacctcttttttgctttggcgtaaaacgcatttttgataaaaaaatatcaagggacatccacggttccccttgatatttcatctgcttattttatcaaatttacatttttaattaaaacgcactgctttttgttttttgaagcatcctgcttctctcttttatttgaaacgtgccgtttctttttatgaagcatactgcttcttggtttttttgataaaactttatatgttcaatcaaaagaggagaaaccgtttcggcggtttccctcttttcagggcatcagggtaccggagccaatgcggtttgaaaaggccatctccaccgctatctgcgcaatactcacgcgccatgcgccagcatggcttgttcgctttgcttgcaactggcggagctatctcttttcaaacttctccgaaccaaatcatgaggcttttatcggttatggcgaggcagaggacgaacgaaggcttgcgccttcggaggacgataacgaagccagagccagaaaagcccatgatttggcgcattgttcccggcatcctgacgcccgtcacctttccgccgacaagggaaaacctcgtcgcaggttttcccttgaccctttccagccgagcaaggggctgcgccccttacaaaccccacacaatagaaaccatgccgttcctcgttttatgtacgaggtgtaaaatagatactacgggacgtttcagcgccgcgccttcgcgcggagtacttcgcgggtgcggtactttgtatacttttttaccttctatgttttcctacacgatttaattcaattaaggcgcaggccgttttctcctaaggggattttcaaggggctttgctccttgaatcggctgtggagggataggcggagggcggcgcgatgcttcgccgcccgtaagccgtaagggaacccatcgaaagggttcccttggaaaagcgctcgaagaggggttacaaaggggaggaacagccgcaactgttctctcccctttgattacttaaaatatgttattaattgataattatttgtttaaagaacaaagcagtatccaaagtggatatttccagcaataatctgaattctaatgttatgatagtataaagttgatgtttaagggagcaaattaaatgtttgacaaaaacgaagcagtagaaaagaagctgctttcggagctgttggaggaaacaaaactagatgcggacgtgcttgagaaaatagggtttgcgagcagggcgttctatgtattacgttcgttcgatgtagtaccgtttggcgactgcgaatatgaggattacttttgccttgcgtgtttgacggcaagcctttcctcctgcggcagccagatggagattgaaagcggctgcgatatgattgccttatgcttggagctgagcttaggcatgcaggagaaacaggcggcacggaaggacggcatacggaaagaaggggttctctgtgatacataacagctatctggaagagctaaacgggctattgcaccggatagcggaagacccgcaccgtcaggggctttgcgccgaaggaaaagaattacagggcgaaacggaacgcgaagagctgtacctcgatttcagctaccggaagctggacgaaataggctatgccctttactgctttgagcggatgcaggcgctcagggaaccgcgcctttctcctgaagaatggcaggcgctaaagcacagctttgtgctcgggagccttgcggtaagcggcggcaggccgtcccgtgaagaaaccattaaaaaagcatatggtcagataaaagaaacgctcacgcattgcgtgggcatagcgtaccatacggacaagcaggaggaaggcatatagaaactccggcgaaagccgcgcaaaagtaccactcacaaagcactccacataccaagaaagtaccgcacccacgaggtactccgcgcgaaggcgcggcgctggaacgtcccgcagtatctgtgctacaccccgtacataaaacgaggaacggatagttatctcttagggggattttcaaggggcttcgctcccccatcggctgtggagggataggcggagggcggcgcgatgctttagccgcccgtaagccgtaagggaacccattgaaaggggtcccttgtaccgacgaaaagggtttacaaaagggaaaaacagcggattgtttttcccttttgattaaacatagaaagttttatcaagaaatccaagaagcagattgttttcttcaaaaaagagaaaaagcatgttaaaaaaagaaaaacagcggattgtttttcccttttgattaaacatagaaagttttatcaagaaatccaagaagcaaattgttttcttcaaaaaagagaaaaagcatgttaaaaaaagaaaaacagcggattgtttttcccttttgattaaaacatagaaagttttatgaagagacccaagaagcagatggctttctttaaaaagagagaagcaggatgcttcataaaaaacaaaagcccgctgcggcaatgaaaccgctgcgggcttaaattttaattaatcgaataagtgattcaaaaaatccccaatcgcgtcaagcgcgctagttgtaagcagctccatgctttgctcgccgagcgaaaactccttgatttcaagcgtgacctcctgcgacataacctctaccgagacctcggacggaaagcgcaccgtgcttccttcaaacgtgagtttgtccgacaggctttttaccgaatcgttctggaacaaaaacggcgtaatccaatcggcggggacaggcagcttgccgagctttgtgttggatagcgtgacaacaaattccttgccctcgctgtcaagcgaaacctgcgcgtcgccggacagcacgagcacttgccccatgccgttgagccgggcgtaaaccctgcacggctcttccttatgcaggctgaaaacgagcgcgtccatccggatgggggaggacgcctgctcctcgtccgcggccgcgcgctgctggaacaggtaggcgagcatggaattgagctcgctttcgctgatttcctgctttgcgccgaacatgactgactgcgcgagcgtgtaggcgagcttgttggaagattcaacctcaaactttgaaaggccgtcggtcgaaagcgccaggttgatggcagtcactgccgcaatcgcaaggagcacaaccaaaacgccgatggtaataaaaatattccgcacagcatgcccgcgcttttcgggctcctgctccggctgcccgaaatggtcgccgtaatcgtcgggcggcacagcgctatgtatttcctttttcatataaatcctccgtttcggggctgaatcacagtatggcgggaacttcttgctttcccagtgcgttacgcagtttatttattgggacggccattgtatcggccgtattagtccggcagttgacccccgttaaaaccagcgtgccatctgtccacccggcgaaatcgatattgtcataaatatcgtaatttgcgtcaaccagcaaatggatatccagccacgcttcattggctttcaatggctgtgaaaaatcgagcacggccacagaataagggcgcgcccaaaaacaaccgggtatggcaagaaggctgctttgcggttcgtaatatgcgtccatccagataaaggtttccgcgaaatcctcctttccatatgggaaagactgggctgggatatagtggaggtcctgcatggtttgcagattcaggacgctgtacccatacaggtcctggcggaaaataagataatcattcccgtcgctatgctcaatgagccggtagaattccgcgttgttatcgatattgtaccagcggtagaaaacctcgcctctttgaccttgcagctcgcattcgcttccacgctgtggattattttggtttttatctttatagtcccgcactttgagtataaaggcgccgggttcggtattcagctttattttttctgtacgcggacagaggtattcaggacgaaacacggacatacgctgtttccgccaattctggtattcttttgtgtatgccacattcatatgcagggttcccttccaataatggggcggatggatatggatggaattaattttatttcagctccacaatggtcacgccgctttcaccctcgccgtatacgccgaggcggaagctcttgaccgctttgttcccttttaaatgcgcgtgtacctcacggcgcagcacgccggttcccttgccgtggatgaccgtaatctgcccgatgccggacaggattgcggaatcgatggcgttttcaagctccataattgcctcgattgccgtcatcccgcgcaaatcgacgtccgttacaggccgcgcggtcgcggcgccttttacattgcgcgtcgtcgagcggacaatttccttctgcggcttttcgtttaacaggcgcaggttgtcgagcggtacgcgcgttttgataatgcccgcctgtacgagtacctttccggaggtgtccgcctcctccagcaccgtaccctttttatcgatatcgaaaatcagcacgctgtcgccctttttgagcgcgcgcggcagggtatagccgctgttgcttttttccttgattgggtcggcgctgtcgtccattttacggataccggcgcgaagctccgccttttcctgcgcgctaaggccctttttcttttcggcctgctcgagcctgtcgaggatagcgtacgcctgtgcgcgcgttttcgcgcttatctgctgcgcttcctccttggctttttttatttcctcgtccgcaagctgtttgacgcggctaagctcctgctgcgcccgctcgcggtcacgctttgccttctgggtgatttcttccgtttccctcaggcgttcctcaagcccctgccggcgcttttcaagcgtctgcacaacgtcctcaaactgcctgttttcagcggataccagctcccgcgcgcgggatacgacttccttcgacagccccagcctttcggaaatggcaaacgcgttcgaccggcccggcacgccgatgagtaatttataggtggggcgcagggtcgcaacgtcgaactcgcagcagccgttttccacgccgtcgttctgtagggcgaaagcctttagctccgcgtaatgcgtcgtagaggcggtctttgcgccgaggacgcgcagccgttccaggattgcgatagcaagcgccgcgccctctaccgggtcggttcccgcgcccagctcgtctatgagcaccaggctgcccgtgccggcctgctttaaaatatcggtaatgttcgtcatatgcgcggaaaaggtggaaagggactgctcaatgctctgctcgtccccgatgtccgcaagcaccgtgccgaacacggaaagctcgctgttgtcccttgcgggtatcatcaggccgcacatcgccatcagggtaagaagccccagcgtttttaaagatacggttttgccgcccgtgttcgggcctgtgataacgagcgtgtcgaacgcaatcccaagctcaatatcggtcggcacgaccttctgcgggtcaattagcggatggcgcgcctccctgagctttattttccctttgtcgtttaataccggcgtgctcgctttcattttatagccgagctccgctttcgcaaaaatcacattcagctcgatgagcatatggtagctttctgtaacctggtcggcaaacgaaccggcttccgcggaaagctccgccaaaatgcgctcgatttccgccttctccctgctgcgcaggacgcggatttcattgtttgcctcgaccacgcccatcggctcgataaaaagcgttgcgccggaggacgaggtgtcgtgcaccagccccttgatattcgctcggcattccgccttaacgggcacgacgtaccgtccgtcgcggatggtcacaatggcgtcctgcaaatatttttggtacgacgcgctgtgtatcattttatcgagcacgtcgcgcgctttagcagaagcgctttgtatcttccggcggatagaggcaagctcgtttgacgcgtggtcagacatttcttcttccgacaaaatcgcgcccgtaatcttctcctctaaatacttatttggcacgagcgtttcaaaatacgggtcgagcgacgtttccaccgaagcggatttctgccgccactgctttaacgaacggataacgcgcagcacttcggctatacgcagcagctcgggcatcgtaagaacgccgcccgcctgcgcgcggcgaaggggattggatacgtctttcacgccgccgaacgacggggcgccgaaccgcccgctgagcatatgcgcgtcgcttgtttctttttgtaaaagggtaacctcatacagcccgtgcgccggcgccagccggagcgcaaggtcgtgcgcgtccgcgcaggtcgtttcctgcgcgagcatatgtaatattttatcaagctccagggctttttcgtgtctgttcattttcaattctccggtgtgtatctatgttagtctcgtatggttttataaaaatcgagcgttttaaagcttttttcgctgatatgcagcaggtattcctcgcttgcgcgctccagcagggcgatggaatcctccggcagggtaaactggaacagcttgtcaaactccgcgtaaacgcagtggcgcatcgcggtcgtcacgcccatgcccagcaggatggaatattcaccgttttctttgaggcagtccccacacagcaaaacgccgcgtttcggcaaaaaatgcattttttcgtgctcgtagcatttgcagccctcacaacagacgagatcgggcatatagccgccgattgtcagcatacgcagctcgaccgccgccttgataagccccgcggggcgcttgccgcgtgaaagcaggtacagcgcgtttagcagcaggcgcaggtaatctccggcgggcaggttttccggcacaaaatggagcgcaagctcacaaaagtactgcgcaagcgacatgttcaccacatcgtttctcagtgggatgaacatctcctcagactgcgcctcgtcgatggtataggtatcccgcccggcgaaaatcaccaggcgggaatagcacagcagccgtgtggcggctcccttggggcttttaaggctgcggcagttgcgcacaaatgcgcgcacaacgccgtggcttctcgtcaaaaccgtgaccagcctattctgctccccgatattctgttccctgagtatcagaccatccgtcgaaattctcatgcgcggcctcctgcgcgatgccggcgccgggctgctttccctcgtttttaatcgttgtatacgttaaatagtcgagaacgctcccggtctgtaaaaaagccgtccaggcatccgtttcgtccatatcttacacacccttaaccgttattaaagcggacgttttttcgtccctattaacagtatactcacgcacaatggtgatatagcgtgtaaattgtagaacaaaattaagttaattttttccttattttatcgttggcgcgtttagtcaaagttcgagctgtcgtagccgagcgagcgcaggataccctgccggttgcgccagtcctcctttaccttgacccacagggtcaggttgattttacagtcgaaaaaccgctccatgtcctgccttgcaaaggagccgaccttcttgagcatggcgccgcccttcccgattatgattcctttatggctgtcgcgctcgcagtaaatggttgcgtccaggtctacgatgcctgaattgtccgggcgcgttttcattttttccacgaccaccgccgttccgtgcgggatttccttgtcgagcaggcgcagcagcttttcgcggataatttcgcccgcgagcacgcgctccggctggtcggtcagcgtatcgtcgtcaaacatgtggccgccaggctgggagagctttgcaagctcccgcttcagctcgtccacgcctcttccatcctgcgcgcagaccgggacgattgcttcaaaatcgaattctttactgtaatggagaatgcgttccatcatttcttccttgtttttcagcaaatcgattttattgagcgcaagcacggccggaagcccgagctttttaaatttttcaatgagtgtaagctccgtctgcgacgggtcgtaccccgcctccgcaacgagcaggcaggcgtccacgccggacaccgactcgtttacagagcgcaccatgtagctgccgagctccgtgcgcggcttgtgcataccgggcgtgtcgataaagacgagctgtacctcgttttctgtcagcacacccatgatacgggtgcgcgtcgtctgcggcttgcttgacacaatggcgattttctgcccgagcatttggtttaaaagagaagacttgccgacgttcggcctgccgactatcgcgataaacgccgttctgtcattatcgttttgatttgttatcagttggttcaaagagctacctccgtggccctgcggccctgtaaatttgaaaaggcggagagccgatccctccgcctgtccgtatcgtttccaatggtaaggtgttttattggttcccgccgtcatcgttgccgccttccctgtggaacagggattttgcgttttccgccatagcggctgggccgatgacaatgaataataccgctatcagcagcgttagtataaacagcgtaaagactgccggttctccgcaaaggaaattaacaagcgcccacagcctgtccggctgccagaatatcagcacgccgatgacagccgcaaagatagcggttacgagcacggcgcccgcggcaacgtcctttgcaagcttgataagcgggtggtattcctttgttacggcatcgctgattttttccaccgccgtattgacaagctccgccgacatcacgctgcctatcgtgagcagaagcagcgcccagcggtccgcaggcagcccgaaaaaagctccgagagccagtacgtatagcgccgcgacgatatggatgcgcatattgcgctctgatttgattcctgccgcaatgccgcggattgcgtaacggaaggagcgaaaaaagtccattactcgttgataatatagctcgaggaagcgggcagcccgagctggtccataatatattcttccttttccctcatatgtacccgttccaggttgtcctcatggtcatagccaagcagatgcagcacgctgtgcgcggtcaggtagccgacctcgcgctggaggctgtggtcgaaccgcagcgcctgctcctgcgccttttccatggaaatgacgacgtcgcccagaatctgcgcgcccgtgtcggggtcgatatcgtacacgccgttttcacccatgccgaacgaaagcacgtccgtgaccatgtccttgtcacggtactgcttgttataatccttgatttgcgcgttgtttacaaaggtcacgctgatttccgcggagcccttgaattcctccatgcgcagcacggcgttgcagcagcggcgcacaagcatgcgcagccccgtgggaattttaatttctttttgtttgtttgttatgatgactcttatcttatccatttctgtttcgcttgacctcctcgtttttctcataagccttgatgatttcctgcacaagcttatggcggaccacgtccttctcactgaaggcgacgtgggcaatatcttttacattttttaaaatcctgacgcattccttgaggcctgaacggcatccggaaggcaggtctatctgggtaatgtcgccggtgatgaccattttggagttaaagccgagccttgtcaaaaacatcttcatctgctcgccggtggtgttctgcgcctcgtcgaggataataaagctgtcgtcgagcgtgcgcccgcgcatatacgcaaggggcgccacttctatattgccgcgctccacgtatttctggtacgtttcagcgccgagcatatcgaacagcgcgtcgtacagggggcgcaggtacgggtcaaccttactctgtaaatcgccgggaaggaacccgagcttctcaccggcctctacagcaggcctggtcagtatgatgcggttgacctgcctggaacggaacgcggtaacggccatagcgaccgccaggtacgttttgcctgttcccgcggggccgacgccgatggtaatcgtattgtcccgtatagcgctgcagtactgcttctgcccgagtgttttgggttttaccggcttgcccttggaggtgatgcagatacagtccccggcaagctgctctattttttcctcgctgccgtcgtttacaagcgacatgcagtagcggacgttctgctcgcttaagctttcgccgcggtttacaagctttaagaggctgtcgattaccttcgcggcctttgtaaccgcctcaggctcgcctgtgattttcaggtcggaccccctgcctataacgccgacggcatattcattttcaatcagcttgatattctcgtcaaagctgccgaacagcgccatggcgtgttccatacggtctatatttacaatttgttccagcgctacttcaccttcttgaaagttaaaaaattaacaaatagtaaaaactattggaaatatacaatataaccttaggatgcccaaattatctgtaattataacacagaaaattcttgaagtcattaaaaaagtgtaaaaatattttaatacgtaaacttttgtagaattttcctaagaaaaaaagcggcggttttcctgaatctaggtggttttacacatttttacacgtgtattccatttgctttttttttggaaaaatggtaatatgattttaattatagcagaaagggggattcgtcatggcacaggtatgccttcccgagggcttttccctgcctggggaactcctttccttacttcaaagcgaacggcttccgcacgctgtcgcgctgcaaagcgccggcagggatatgcgggagggctgcgcgcggcttcttgcccggtgggctgtctgcaccggcggggaagaaaggccatgcggaggctgcccaggctgtataaaggagcgggccggaactcacccggacgtatacacggcgcagggtacaggcaagacgcaggcaatcccggtcgatgaaatccgtaaaatctgctctgacgcgtatattattccaaacgaggcgcgcgcaaaggtttacgtattgccggacgcggacaaaatgcttgcccccgcgcagaacgcttttttaaaggtgcttgaggagccgccgcagaatatcctgttcctgcttacctgcgaaaacgcgcagaaccttttacaaaccatacggtcgcgcgtgacggttttcgtcctggacaaaaagggcgttgcgccggatgaacaggacggcagggcgtgcgagcaggcggccatgcttgccgaagccttatgcgcaaagaaagaaacggagcttctcagggcaaccgccgcgcttacggacaagcagcttgcaaagaagacgctttccctgttttccgaaattgtgcgggaagcgctcgttttgcactaccggcaaggcaaagaggcagccggggcggctcaggagcttgcccgggcgttaaagccgcaggggctgctcagtacgctggaccttttggggaaggcgcaggtgaagattgagcgcaacgtgaatatgacgctttttaccgcatggctgccaagcgctttgcgggagcaaaagtataaataaattttaaatagaaaacggcgggcggcccgctgcaggaggtttttatggcagaagtcatcggcgtacgttttaaagaggtcgggaaggtttatttcttcgaccctgaccatactgaattaaaggaaggcgagccggttatcgtggagacggcgcgcggcgtggaatgcggctttgtcgcgacggaaaaccgcgaaattccggatgaggaaatcgtccatccgctgaaaaagcttatccgcaaggcgacaagcgaggacttgaaacgtgtggaggacaacaggcgcagggagaaggaggccttttctatctgcgaaaagaagattgccgcccataagctcgagatgaagctcgtcgatgtggaatacacgttcgacaacagcaaaatcctgttctactttacggctgacggcagggtggatttccgggcgctcgtaaaggatttggcgagcgtgttccgcacaaggattgagcttcgccaaatcggcgtgcgcgacgaggcgaaaatgctcggcggcttaggtatctgcggcaagccgttttgctgctccacattccttggcgaattccagccggtttccattaaaatggcaaaggaacagggcctttccctaagccctgtgaagatatcgggtacatgcggcaggctgatgtgctgcctgaaatacgagcaggaggcgtacgccgatttgctgcgtaccacgccgaagctcggcgcgattgtcagcacgccggagggcaagggcgtcgtcgtagaccaaaaccttcttaccggtattttaaaggttcgcatggaccgcgcgcccgaggctgcgccgcagacctttaaggtcaaggacgtcaaggttttaaaggacgcgcagattaggcttgataaaaaagaaatagaagagcttaagggtctggaataaattttatgcaggacatgtaaatattacttttttcagcaaaaccgttgcttttttccgaaacgatgctacaatagagttgtaattttaaaaggaggtgttcccccatggcatatacaattaatgatgattgcatttcctgcggtgcttgcgaggcagaatgtcctgtaggcgcaatttctgagggagacggcaaatacgtaatcgatcccgaaacctgcacagagtgcggtgcttgcgcggatacttgccccgttggcgctccgaaccaggagtaattttatcacaacagaaaaaataaacggcaggggagtttctctgtcgttgtttttttgccatcgtttaggtctttacatgaggggaggcgctctttatgctaaaagatggggaacggctcgagccgcttggcgggggtgtgcgggtaattgtatcgaatgagcaccgcttcacaaccgatacggtcctgctcgcccatttttccgcgctgaaaaagaatgaaacggccgtggagctcggcagcggctgcggggctatcccgcttttgtggaacaagacgggcgccccgaagcatatcgacgcagtggagctgcaaagcgatgcggcggacatgcttacacgttcggttgcgctcaacggctttgaagaaaccatttctgtttttcaaaaggatttgcgttgcttaaagggcacgcttccattcggtgtttacgatttggcagcctgtaacccgccttataaaatgcttggaagcgggctgcaaaacccgcgggaggcacacaggcttgcgcgccacgagtgcgcgtgtaccctggaggatacggcgctggccgccgccaggctgctgcgcttcggcggacggttctgcatgtgccagcgcccggagcgcctctgcgatattatgaatacgcttcggaaagcaaatttggagccgaaacgcctgcgcatggtgcagcagcgcgcggggaaggcgccgaagctcgtgctcatcgaggcaaggcgcggcgcgcgccccggcgggctggtggttgagccggctctcatgattgaggataatacaggcggcttttcacaggaaatgctcgcggtttacggcgattataaatgtgagtgcttataaaaccttttttcgggatagcatgacagctttatgattttaaagaaagaatccggcgttttccttttgacaatagtatagaaagaattcaggaaaagcaggctttataaaaaataattttttccagccggctgcggcttctataagctgaaaagcgcatggtaaccggcttccttatagaatgaatctaactgtaaaacggcagaacagcgcccgtttggtgctcaaacgaacaaatagggttttggacagctacataaagctgtgacacgaaatgagctgtttgacatttccttacgctgatattagaatgaaaaaagcttagttgggtttatttgcctttgaaaattgaaggcgcgccagcaaatgggaagctgtcaggagaaagcatatgagagaaatagacccaaaacaaacaaaacgagcaatggcctttgcgctttggatggacgcccccaatcccatggtaacattttttaaaacgcttgatgttacaccgcttgtccggataagtaaaaagcagcattataaatttaacatgctgcttggttattgtattggtaaagcgtccaaagacatggaagtcttttatttgctcccggttgggaaaaaactgatacagtatcctacgattgctgtgaacacgattgtaaagaataaaatcggcgaagtaagctcttgcgatatactgttccatgaagacctatcacaatttaataacgattacttgaaatatacaaaacaggttgcagaaacctgtaaaaaccacgatttgacagatagtatggtaattggtacgtctgcaataacgaatgtggatattgacggcgcagttggtatgtacagcggcatttttaataatccgtttataatctggggcagatataagaaaaaattgtttaaaaccaagttgactatatctttccaattccatcatacacagatggacggcgcgcatgccggcacttttttggagcggctgcagcaagaaatttataatttgaaggtttaaacaattctggtttatcgggctagtacgaaagtaagaaaacttgggtgtattcacatttggcgagaattgcgcgtttgaaaaatagtaatatgatggggaaaattaattgaacaaagaacatcctgcattcaggtccataaatatgaggcttcaagacagtggcttgtttaagagtgcaaaagaaaacaagcatagaccaaatgcaatatttagcattataatatttttttgcttatggggaggctcccttatcttagggcgatttgtaacaatcccgattattaaatcattccctaacgacacgccgctttggattgcttttacttcggctttgcgaaaaattcttatttgcggctttcaaattctcgtgttttttgcgtgggtgaagcttgtggaaaagcgcagaatagcaaccatgggatttatttgcaaacataaggcaaaggcatattggggaggttttttatttggatttgcctcaatttctattataacttttatattggcggctttaggggcaatagaaattgattttaattatttattcccgatagacattttattcggttcactgtttgttgctgtatttggatgggggattcaaagcgcgtcagaagaaattgcaatccgaggctggctaattcccacattggggctgcgctataatcccctagccgctgtgctgcttactggcggggtatttggaatccttcacttattgggtaatggtgcaacaatcctctcgttcataaatttaacgctctccggctttttcttcgcgatgtatgcaataagcgcgggtaatatatggggcgtttgtggtttgcatttaagctggaatttcgcgcaaggaaacatattcggcttgaacataagcggagagccaagcaccagctattcactgtttgtcacaaaaaatacaggtgcggacctatggacgggcggagactttggcccagagggcggattcattacgacgttgtttttggtatgcgctattatgcttttaggcatgaatatgtatagaaaacacctggcgctcattcgtggtgacaattaagggcttaagttatcatgataaaatttaaaggagaaggaggcggaagaatggcgggaaccttatacgttgtcggcacgccgattgggaaccttggcgatttttcgccgcgcgccgtgcagacgctccgggaagtagattttatcgcggcggaagatacgcgcgtaacgctcaagcttttgaaccgctttgatattaaaaagccgatggtcagctattttgaacataataagcgcgagcgcggtgaaattatctgtgcccgtctggaggaaggtgaaagctgcgcgctcgttaccgacgcggggatgcccgccatttccgacccgggggaggagctcgtgcgccagtgcgcgcagcgcggaatacagacagccgccgtccccgggccgagcgccgttattacagcgctcgcgctttccggccttccgacaggccggtttacctttgagggctttttgagcatgaataaaaagagccggcgcgcgcatctgctggaaatcaaagacgaaaaacgcaccatggtattttacgaggcgccgcacaagcttgcaaacaccctgcgcgatttatacgaagcgctcggcgacaggaacctgtcaatcgtgcgcgagcttacgaaggtacatgaagaagccattcgcaccacgctttccgaggcgtcgcggcgctatgcggaaaataccctcaagggcgagctggtgctcgtggtcgaaggcgccgcgcaggagcaggaaaaggcctttacactggaggatgcctgcgggcttgcgctttcctatataggcgaagggctgtctatgtctgacgcgtcaaaacgcgccgcaaaggaaacgggcctgaaaaagggagatatttacaaacagctttctgaagacaagctgtgaaaggaggttttatttgatgacatacagccaagcggttgagaaaatcaattcgcttttaaaattcggctcccgcccggggcttgaccgtattgaaacgctgcttgataaaatggggaggccgcaggacaaaacaaaatttatccatgttgcgggtacaaacggcaagggctccgtttgtaccatcctgtcgggcgtgctgcgcgcggccggatataaaacgggcttgttcctatccccgtttatcattgatttccgcgaacggatacagattgacggggagatgattcccgagcaggcgctctgcgaaatcacgggggaaattatgccgctcgttgaggagatggcggcacaggatgaaatcatcacagaatttgagctggtaacggccatcgcgtttgaatggtacgcccgcagccgctgtgacgccgtcgtgctcgagacgggcctcggcgggctgctcgattgcaccaatgtaataggtacgccgcttgcgagcgtcgtcacgtccatcagcctcgaccatacggcggtgctgggcggaacgcttgaggaaatcgctttccagaaagcgggcatcatcaaaccggaaggaaagacggttttttatccgcagcaggaggaagtaaaccgcgtaattttggatgcggcaaagcagcggcacaacgatttttataatgcttccgattatttgccggagcttgtttcaacctctgtcaaggggacgaaaatgcgttttaaggggcaggagctgtccctcccgctgattggcgcgcatcagttgaaaaacgcggcggcggcgctcgcggcagtcgcagcgctgcgcggcggccttgatattcccgatacagccgtggaagagggctttgcaaacgcgtttatccccgcgcggctcgagctgatggacgaaaacccgctcgtcctgcttgacggcgcgcataatcccggcgggatgaaagcgctttccgaagcggtgaaaacctattgcaggggaaaaaacacggtttgtatcatcggtatgctgcgcgacaaggacagcgtgacctccctttcctatataaaggggctgttttcaaccgtgattgcgctgtcgcctgacaatccgcgcgctatgccggcagaggagtttgcgcaggaagcgcgcgcgtattttgatatggtcatacccatgcaggacaaggcgcacgcggtcaagcgcgcctttgagcttgcgggcgaggacggcgccgtcgtcgtgtgcgggtcgctttatctggcagccgagctgcgccccatcctgatacggacaagaaacgaacgataatccaaaaatatgacaaccggtttcgataaaaatttttaataacatcatctattattactgttagtagatgatgtccccccagcgcggacgaagttttcagggacaaacccggcaagccccgcgcggcagtatcacaggcattaggaatcatctatctctttgggataggtgattttatttttttgtcggaaaatgtatattatcgcgctgaccttccaatactatccaaaatacatacttttcataggaatcggggaatgtgaaatgaatgttcagcttagctgcagcagcaagggcgagctgaccgcccttttgagcggagaaatcgaccatcacacggcgcgggggatgcgcaaggcaatcgacagcgaatgcgagagaatgcatcctaccctgctcaagctggacttttccagcgtacaatttgcggacagctccgccattgggctgattatgggaaggtaccggctgatgcagctgctcggcggttatgtcaaggtggtaggcgttcccaaacacctgaaacggctgattgagctgtcgggcgtaggcgccctgggcgttttggagtttaaaggaaaggaagtgcagaaatgaagcctgtaaacgagatgaagctgagctttctcagccgcagcgcaaatgaaagctttgcaagggcggctgtttcgtcctttgttttacagctcgacccgacggtcggcgagcttgcggatatcaagacggccgtgtccgaggccgttaccaattgcattgtccatgcctacgccggaacgtcgggcgtcatatacataacggcgcagatttttgaaaaagggcgcttcgtcataaaaatacgcgacaggggctgcggcatagaggacgtgaagcaggcgatggaaccgctctatacgacgggaggcgaggaacgcgcggggctcggatttgccgtgatgatgagctttatggataaagtaaaggtgtcctcacgcccccagatgggtacggtcgtgaccatgacgaaaatgctttcgcaaagcggggagcaggatggctgacagagccgctttcatcaatgaaaacctggggcttgtccatgcgtgcgccaagcgcttcaaggggcgcggcatcgaatacgacgacctgtacggcgcaggctgcgtcgggcttgtcaaggcggccgacaattttgatacgggccgcgggctgcgcttttccacctatgcggttcccgttatcctgggcgagatgcgaaggctgttccgtgacggcggcgcggtcaaggtcagccgcagcctgaaggagctgtccctgaaagcgacgcgcgcctgcgaggcgtttgccgtaaagcatgggcgcgacccgacaatcagcgagcttgccgaaagcctgcaggttgagccggagcttgcggctgaggcgctgaacgccgcggcgaggccggtttcgctttccgcagacgaggaaaacgggggcgggcagctcgatatccctatagacgcgcctgaggagaagctaacggaacttttgtccttacggcaggtaatcggggagcttgacgagcgcgaccgggcgctcatcgtcctgcgtttttttaaaaactttacgcagacgcagacggcgagagagctttccatgtcacaggtccaggtatcgcgcagggaaaagaaaatactgctgctgctgcgggaaaagcttgtggtttgagccggaacccggcccagttgcaaaaaagcgtttggaaacgtcttgcttccaaacgctttttatttttcttcatcctttgaaagaatctccatcatcagccgcgcgccgcatttaaagccgtctacatagccctgcgtcgtttccatacactgtaagtctgtttttagcagcattacgttttcatagtcctgcttaagctgcgcggaaagcttttcgtaaaaggccttttccgcctctttttccttttcggcagcctccctgtactgcggtgtttttggtattggatatttttcactttcctgcgtaccataaaatagctgcatgatcgtgtcctgcatacagatgtgtctccttacaatttaatataataaataacgggaccggctaccctaaaacaggttagtctcagcggccatgcaggatgccgcacgcccagcgtccggtatattggtgaaccgcttatggtcctgtaaagaaagtttttcctccaatgacaaatttatttttagtttaaaccaattcgggttaaatgtcaatataccaatacggtttacatataatgtcagcaggaggattaatactatgtatcgaagattaaaagagatgcgggaagacaaagaccttcgacagaaggaattagcaaaacatctacattgcacgcaggtatgttattccagatatgagctgggcaagcgggatattccgaccgattcgctgataaagctggcggaattttacgataccagtattgattacctgcttgggctgacaaacgagcccaaaccgtacccaagaaagaaaaaagaggaaaggtagataacctttcctcagacgccttttattttgcagcaggcggttagggagcgcggcgcgcgccgttaagcttccggcagccttgttcttttgcgctgttttttgccaaaacggtgcttttttattgagaagcatcctgcttctctctttttaaagaaaaccatctgcttcttggtttttttcataaaactttatatgttttaatcaaaagggaaaaacaatccgctgtttttcccttttgtaaacccttttcgtcggtccaagggaaccctttcgatgggttcccttacggcttacgggcggcaaagcatcgcgccgccctccgcctatccctccacagccgatgggggagcgaagccccttgaaaatccccctaagagataactatccgttcctcgttttatgtacggggtgtagcacagatactgcgggacgttccagcgccgcgccttcgcgcggagtacctcgtgggtgcggtactttcttggtatgtggagtgctttgtgagtggtacttttgcgcggctttcgccggagtttctatatgccttcctcctgcttgtccgtatggtacgctatgcccacgcaatgcgtgagcgtttcttttatctgaccatatgcttttttaatggtttcttcacgggacggcctgcctccgcttaccgcaaggctcccgagcacaaagccgtgctttagcgcctgccattcttcaggagaaaggcgcggttccccgagcgcctgcatccgctcaaagcagaaaagggcatagcctatttcgtcaagcttccggtagctgaaatcgaggtacagctcttcacgctccgtttcgccctgtaattcttttccttcggcgcaaagcccctgacggtgcgggtcttccgctatccggtgcaatagcccgtttagctcttcaagatagctgttatgtatcacagagaaccccttctttccgtgtgccgtccttccgtgctgcttgtttctcctgtatgcctaagctcagctccaagcataaggcaatcatatcgcagccgctttcaatctccatctggctgccgcaggaggaaaggcttgccgtcaaacacgcaaggcaaaagtaatcctcatattcgcagtcgccaaacggcactacatcaaacgaacggaacacatagaacgccctgctcgcaaaccctattttctcgagtacgtccgcatctagttttgtttcctccaatagccccgaaagcaactttttttctaccgtttcactcataaacatcctcctttaacacttctttatacctttataacatacttttttaaaaatgtcttaaaaaacgaacacaagtgtagcgtaaaaaatttttcacacagcaaatagccgatgcaataggagtaaagcaggaacaatacaggcggtatgaagttggagaaaatgagattaaggcgagctacattataaaatttgcaaaattctatgatgtttctgctgactacattttgggattgacaaaagatgaaagaaaattttggtgaaattacttcactcacgaagcactccacataccaaaaaagtaccaaccttaggaggtactccgcgcgaaggcgcggcgcagaaacgtcccgcagtatctgttctacgcctccagacataaaacgaggaacggcatggtttctactgtgtggggtttgtaaggggcgcagccccttgctcggctggaaagggtcaagggaaaacctgcgacgaggttttcccttgtcgatgaaaagggtttgcaaaagggaaaaacagcgaattgtttttcccttttgattaaacatataaagttttatgaaagaaaccaagaaacggcacgtttcaaataaaaagagagaagcaggatgcttcataaagaaacgggacgtttctcaaaaaaacaagaagcagaaggcttccttcaaaaaagagaagatggggaagagggggaaccgcagaacggttccccctctttgcaaaaacggctgcgctgtgctacaataggcaaagcttaaaatgaaacggagagggcgcctaatgctcaaacaatatcttgaaatcgggaaaatcgtgggcacgcacggaatcaagggagagctgcgcgtcgagccctggtgcgacacgccggaattcttttgccggcttacatcgctctataaaaatgaaggggcggacaagcttgctgtgaaatcgcgcccccacaagcatatggcgattatgaaaatcaaaggaatcgacacggtatcgcaggccgatttgctgcgcgggactatcctttatatggaccgtaaggacgcgccgctgagtgaggacgagtactttattcaggatattataggcctaagggcggtagacgccgatacaaacggggaatacggcgttattacggatgtatttaaaacgggagcgaacgatgtgtacgaattaacggacaatgaaaaacgcgtgtttttaattccggttatcccgcaggtcgtcattgaaaccgacccggaaaacggcttcctcgccatccgcccaatgaaaggaatgtttgacgatgaggattgacctgattaccctttttccggaaatgtgcgaggcggtcatgggggagagcattgtcgggcgcgcacgcggcgcgggctttttggaggtgttctgccaccagctgcgcgactatgcgttcaacaagcacaaccgtgtggacgattccccctacggcggcggcatgggcatgcttttgcaggcggagccgattgcgctgtgctttgaagacgtctgccggcaggcgggtacaaggccgcattttatttatatgtccccacagggaaaggttttgacgcaggagagaataaaagagcttgcgcagtacgataatatctgtatattatgcgggcattacgagggtgtggacgagcgcgttctggacgaatatgccgacgagcagatttctatcggcgattatgtcctgacgggcggcgagctgcccgcgcttgtcctggcggacgcggtctgccgccttgtccccggcgtgctggccgacgaggaatgcttcgaggaggagagccactacagcggcctgctcgaatacccgcactatacccgccccgcgctctggcgcggcagggaaacgccggaaatccttctttcgggccaccatggcaacattgaaaaatggcgcaggcagcaggcaatcctgcgcacggcaaagcagcgccccgacatgcttgaaaaagcggcgcttaccgacgaagaaaaaagatttttggaggagaacctccaggaaaattgacggttatttcctttggagcataatttactgtatgtccaccacaaaaattagtattgtttctggttaacgtgcacaagaaaacgataccatttctcatggcgaatcgttcatcaatccgaaaatacaatttttttgttgacggagtgcttctttgtgatataatactaacatgcacaattttgctgtgctgttttttcttttaaattttaattgttgccaaacaaatttttaaaccgtaaacaacttaaatttaggtaggagagggttcaatcatgtttgtgaaagatgtagaagttcaaaatcaggtaggcctgcatgcacgccccgcaaccttttttatccagaaggcaaacgaatataaatcttccatctgggtagaaaaggaagaaaggcgcgtcaacgccaagagcctgctgggagtcctttcccttggtatcgtgggcggaacgtccatccggattattgccgacggcgccgacgaggaaaaggccgtaaatgatcttgtaaaacttgttgaatccggatttgcagagtaagcggataagtttaggttgacagcggacggagcaggctccgtccgtttttttatgcggcaaacaggaaaagggggataagcggtgatcagcgaaaatttaagaggcctgcgggaaaaatcgatgaagctgccgcttcttcccggcgtatacatcatgcgcgacaaatcggggaagattatttatatcggcaaggccaaggcgcttaaaaacagggtcagctcctattttggctcgcagaacaaccatcctgaaaaggtacgccgcatggtcgaaaacgtcaaggatttcgactatatcattaccgacagcgagttcgaggcactcattttggaatgcagcctcatcaagcagcatacgcccaagtacaacatcctgctcaaggacgacaagggctacagctatatcaagattacaaaggaagcgtggccgcgcgtttcggaatgcaagcagacgactgataaaaacgcggaatatatcgggccttacaacagcggctactatgtgaaaaacgcggtggacgaagcgcgaaaaatttttaagctccccacctgcaacaggaaattcccagaggattttggcaagggcaggccatgccttaattaccatatcaagcagtgctgcgcgccctgccgcgggaagatgtccaataaagagtacaacgaaatttttgccgaggcagtggaatttttaaagggcggcagcagtatttccattaaagagctgactgaaaaaatgaacgaagcggcagagaacatggaatacgagcgcgccgcgaaaatccgcgaccgtatcaccgctgtgcggcgcatgagggaacggcagaaggtcgtcgcggctaaggtgaaggagcaggacgttatggcgctcgtgcgcggcgcgggcagcggcggctgctttgaggtgttccggttccgcggcggcaggctgtgcgaccgggagcatttcatcgtgcccgacgtgggcgaccccaaaaccgcgcgagcggaattccttacgcagtattattccatcagggaacagctgcctccgcgcgtcacgctcgacggacccgcggaggggagcgtaacactcgaacaatggcttacacagaaggcgggcaggcgcgtgcatatcaccgtaccgcagaagggagagcagctgggccttgtttccatgtgcaagaacaacgcggcggagcatcttgcgcagcagcgcgggagcaccgggaaagaggcctcggcactcgatgagcttgcggggcttttggggcttgagacggtgccgcagtatattgaatcgtacgacatctcgaaccttgcgggcagcgacaatgtagcgggcatggtggtctttgaaaacggccgcccgcttaaaagcgcataccggaagtttaaaatcaagggctttgaagggcaggacgattacgcctccatgcgcgaggtcgttacccgccggctcgacgaatatgagaaccgaggcgatgaagaggacggcttcgggcgcctgcccgacctaatcctgctcgacggcggcaagggccatgtcgcggtgattgagcctgtcctgcgcgcgcgcgggtacgatatcccactgttcggcatggtaaaggacgacaagcaccgcacgcgcgccgtaaccggcagcggcggcgaaatcgccatcaattccaagcgcagggcgtttacgctcgtttcctccatccaggacgaggtgcaccgtttcgccatcggctaccaccgccagaagcgaagcggcggcgcgttcaaaagctcgcttactgagattgagggagtcggcgcaaagcgcgcaagggcattgctcaagcatttcggcacgattaaaaacatcagcatggcagacctttcagagctcgaaagcgcgccgtgcatgaccaaagcgagcgcacaggcggtttacaaatattttcatggttgacaggccatgcgtacggatgagataataaaaaagaagcagaaattaaagtgtacgataaaacgtacaatgtatagaaaggagccgtttgctgtgagagtaattacaggaagcgcgagaggcaggcggattgaaacgcttacgggggaggacgtgcgccccactgccgagcgcgtcaaggaagcggtgttcagcatgatacagttccaggtggaacagaggcgctttttggatttgttcgcgggctccgggcagatgggaatcgaagccctgagcaggggcgcaaagcaggccgtttttgtcgatatgcgccgggaaagcgctgagataatcaaaagaaacctgagcgcaaccggcctggaagcgaacgcgcgcgtgctgaatatggactccattgccttcttaaaacagaaggcggagccgttcgaccttgcgtttttagacccgccctacggaacggggcttttgcagaaagcgctgcccgaggttgcaaaaatcatgaataaaggcggcataattatatgtgaaagtccacaaaatgaggaattacccgggcaaattgacaattttgtgcttgacagaagctatcgctatggtaaaataaaaattagtacttattgtcacaaggatgtggtctgatgcaacgtacggttatctgccccggcagctttgatcccgtgacgctcgggcatgttgacattatcggcagggccgcgaagatgttcgaccacgtcattgtcgctgtgctgtgcaacgtctcgaagacgcccagctttacaacacaggagcgtatccacctgctggaggaagcgacgaagggtatcgagcatatcgagattaccactttcgacggcctgctggccgaatatgcaaaagaacggaacgtcacggctgttgtaaaggggctgcgggcgctgtccgattttgaatatgagttccagatgtcgctcacgaacaagaagctcaatcccgggctggaaacggtttttttgacggcaagctccgagtacatgtatttgagctccagcattgtcaagcaaatcgcatgcctcggcggcgatattacgaattttgtcccgccgtgtattcatgatgaaataaaagaaaggctctattccaataaataaaaaacgctatgctaacgtgtgccaagcttagtaacgtcaatatttagggaatcatgagaaaggaatgacattgaaatgaaagtagaagatttgatcatcgaattgagagaggttatcgacgacgcgaagacgctgccgctttccggaggaaaatcggtgatcgatgcggatcatataaaggaaatcctggacgacatcgaagagacgcttccgcaggaggttcgccaggcaaaggccattgtagccgacagggcgcagattatcagcgacgcgaaaaaagagggcgagagcattctccgcagcgcggaggagcgtaagaaaacgctcgtcaaccagaatgaaatcgtgcgccaggcgcagacggaggcaagcgaaatcattgccgacgcaaagctcaagtcgaaggaaatccgcaaagccgcaaatgaatatgtcgaagagctcatgagaaaaaccgacgagctgatgacggcgcaggtcaacgaaatcaaaaagaccaggcagagcctcaaggcaagccagcgcacgggaaactgaccaattaacgggactttaagcccgcgtttaacgaaaaacaaggaatatatgcagttttgaaggaacaggcggaacgcctgttccttttttgcgctctgcgatgttttttacgtggagcttccaggcgcataaaaacggcataaaatgcgtatttttctgcgttatttggtaaaaatgaaaaaaacggggaaaaaagcggaaaaatttaaaaaatcgtcacatcttttttgaaaaatatattgcttttttaaaacccatagactataattgaagcacaaagtggcactttagaccactttgtggcacacaatagcattaatatatgcgtcaatgacaggaaagtgttgttatgtttatcggtacttatcagcataacatcgatgcgaaaggccgcatcatcatgccgtctaagtttcgtgaggagcttggcgatactttctatgtcacaaagggcatccacaccggcccgcaggaatgcgccggctgcctgcaggtgttatcgcctgcgaaatgggaagaattcctcgcgaaaataagcgcgctgcccgttgcgaaagcgacagggctataccgctatttctgcgcgggggcggacgtctcggagccaaacgcacagggaaggattttaattcccgaccatctgcgccggcatgccggccttgaaaaagaggccgtcgtcataggcgcgggcacacgtgtggaaatatgggaccgtgaaaactgggaaagctatgtcaatatgcaggcgggcgacgatttgtttgcgtcgcttgaaatgatctgattgaatcggagggcgcccaagtggatttttcacatataccggtactcctccgcgaaacgatagaggccctcaatatcaggcccgatggaatttatgtggacggcaccgccgggggcggcggccattctcaggagattttaaacaggctcgagaaggggacgcttatcgcaatcgaccaggacccggacgcggttgagactgtcacaaaacgctttgaaggcaataaaaacgtaaaggtcgccagggcgaatttcagccaaatggacgaggtggtccgctcgctcggttttgaccgggtggacggcgtgctgctggacattggcgtatcctcccggcagcttgacacgccggagcgcggcttttcctttcacaacgacgcgccgctcgatatgcggatgagccaggaagggacaagcgctcgcgacttagttaatacactgccgcacggcgagcttgcaaggattatcaggatgtatggggaagaaagatttgcatcctcgattgcgggcgcgattgtgcgggagcgggagaaaaagccgattgaaacaacgcttgagctggcggaaatcgtcaaaagcggagtacctgccgccaaacggcgcgacggccatcccgcaagaaagacgttccaagcgctcagaattgcggtcaatggggaactggacaggctctcagtggggcttgaggcggcgttttcgctgcttgctcccggcggaaggcttgctgtaattacgttccactcgcttgaagacagaatcgtaaagcagtattttgcacagctttgcaccggatgtacctgcccgaaggattttccggtctgtgtctgcgggaaaaaaccgcaggcaaagctatggaagaaaaagccggttgaggcgtcagaagaggagcttgcgtcgaatgccaggagcagaagcgcaaagctgcgggttttggaaaaaattgtaacaaccttgtaaaaattattaaaaaaatgttttgacaaaacagggtatctgtagtaaactagatgttgtggtcaaaggggtgaaaaacggcctgtttaccacatattgtgcgaccgtatgttcggctgactagccgctgaaaaatagataaaaattaaaaaagttacaaaagtaatacaaggcaatttgccttgtgctcgtctcgattttatatggatttggcaggatgctgtcgaaaaaaacaggaatacatattgtaacgatttcgtatcataaattacagacgttgacggtgttttatatagaggtgtaaggaatggcttttgaagagagaaacgcagcctacgacatcagtttgtttgaagaggctgaaaatatagacgctgattctgcgcagcagaaaaagcaggtacatagaaaaaagaaaaacaatgtgctgagcatcccagaggaacagcttgacagaatccgcaggcacaggcacaatcctttaaagcttgctacgggatttatggcggggctggttgtaaccggcgtcgttgcgatgattgtgcacggtcaggttcagcttacggaattaaaccagcagattagcaatgcgcagagcgcgcttgccgaccagcagagcctttatacgcagctgcagatgaaggtggaatctaagctttctccctcggttgtcgaggcctatgccgtgaatgagctcggcatgagcagggcggacagctaccagaaggagtatatcagcctttctgagggcgacaaagcggaggttgcgcagaccgaaagcggcaatttgtttgaatcgattgcccaggctattgcgggtctttggtcataaccaaatttgttttctaatacatatagaagagaatgacgaagcggttgtaacaggaggcggcgtttgccgctttcagaatgagttggtagacggacgtattactttgtgaaaagggtatgccataccggcttatgttacagccctgtttttttatacgcggaaataaaggaatccggccaggctgtaaaaaggcccgcccgggaaaggccgcagccccaatcggcgcgcggaaggaatggaaaaagatacgcggctgaaggccgcgcggttttggaaaggagaagcctatgtcgtcgaatggtcatgcaaagcttattcacaggtcgattgccgtattggctattttgctggtgctcggttttggcagcgcaatcctgcggctgacgcagctgagcgtcgtacagggggaggagctctcccagaaggcggtcaaccagcagcttaccgatacaacaatcagcgcgaagcgaggctctatttacgataccaacggcaagattcttgcgcagagcgcgacggtctggaaggttgtcctcgcgccgattaaccttgaggacgacgagggcaagggcagcaatagacggaccagggacgagaagagaacaatcgtttcaaagggcctggcggaaatcctcggaatgaagcaggaagagctttataaaatgacggaggaaaaatcgcattatgttgttgccaaacgccagattgaaagcgacgtgcgcgacaagattttaaagtttgaagacgagctggaggaaacttataatattacaggcgtcatccggctgatggaggattacaaaaggtattacccctacggttctttcgcatcctccgtcatcggctttaccggaagtgacgaccaggggcttgcgggcgtcgaataccaatatgacgacgacctgaccggaacgccgggcaggcttatcaccgctcaaaatgtaaacgacgcggtaccgttccccgccgcgcagaaggtagacgcgaaggacggaaacagcctggtgcttaccctggatgaaaaaattcagcatgccctggagaagtacctgcaaaaggggattaaggaaaataaggtatataaccgcgccgttgctattatgatggatgtaaacacaggcgcaatcctcggcatggcggtcgaggacggctatgacctcaacaagccgtttaagctcgttaacgaagaggataaagcggcgattgcaaagcttgcggacgataagcaggcggaggccgagagcgccgcgctttccaagcaatggagaaacaaggcggtcagcgacacgtattaccccggctctgtctttaaaatcataacctcctcaatgggaatcgaggagggcgtcatcacagaccagtccagctactattgcagcggctcgtacacgccggtcgaaggagagccgcccgtatattgccacaataccctgggccacggcacgcagaactttttccaggcgctttccaattcctgcaacccggcgttcatgcagattggccagcagctcggcgcaaagaagtactgggagtattaccaggcgttcggcttctctgagaaaacgggcatcgacctgccgggtgaaagcgaagatattttcttcagccaggatggttcgatgggcccgatggatttggcggtcgcgtcgttcgggcagaacttctcaattacgccaatccagatgattacggcggtatccgcggcatgcaacggcggcaagcttatgcagccctatgtcgtaaagcagattctcgacagcgacggcaacgtcgtcaaatcggttgacagcgtcgtcaagcgccaggtgatttctgaagaaacgtcgaaaaagataaccagcctgcttgcgcagagcaccgagcagtccggctccgcgaccaacggctacgttcagggctataaaataggcggcaagacgggtacttctgaaaagctggaagactccaacgacgacggcgccgaggattacattgcatccttctgcggctttgcccctgcggataacccgcaggttgcgctgcttgtatattttgatacgcccacgggcggcagctattacggcagtgccattgcggcgcccgtgttcaccgagattatgcaggaggtcctgccgtatctcgaaattgaacagcagtataacgaggatgagctttccaagcttgatacgactgccggaagttataccggcatgacggtggaagaagcaaaagcggcggccgagaaggcgggctttactgtcgttacaaacggcggggaaggcactgtcgcggcacagtccccggcggcggaggggcgtatcccgcaggggggcgtggtcgtgctttacaccgaccttgccgcacaggcggcggatacggtaagcgtgccggactttacgggcctttccgtttcagacgcccggtatgtcgcatcccagtacgacctcaacatcagcattgctggtgtgagcagtgaaggggaaggatacgctaaatcacaggatatcgcgtcaggaacatcggtaagccgtggctcggtcatttccgtaacgtttgcggaggacacgagcagcgcacagccgattttctaaatagataataaaaaagaacaaagcataaaaaggcagttcccgctgcggacgtaaaaaaacagccgttccctttaaaacggacggctgcccactgcacagcgggaggcacagccgcccgcgaaagggaggttagcctttttatgaaaaaaggagcaaacacaacacttgcgcaccgctgtacggcaattctttcggttttgctgatactcggcttcggctgtgcggttctccgcctgacgcagctaagtgtcatcgacgggaaggcgcttgccgaaagggcggttgagcagcaattaaacgacacgaccatcaacgcgagaaggggaacgatttacgacgcggcgggaaaggtgcttgcacagagctcgaccgtttggaaaatcgtgttcgccccaagcaatttcaaaaacgacgagcagagggaaatcacagcgaagggccttgcaaagattctgaacctcgacgaagcggacctgctcaagaaggcaaaggagaagacgcattttgtcgtggtcaagcgccagattgaaagcggcgtaagggagcaggttttaaagctcatcgacgagctcgaggacgagcacggcatcaagggagtcatcaacctgattgaggactacaagcgttactacccatacggcgatttcgcgtcggcggttatcggctttaccggaagcgacgaccaggggctttcgggcctggaataccagtacgacgatacgcttacgggaacgcccggcaggcttgtcaccgcgcagaatgcgcacgggacagcgatgccgttttcctatgagcagaagatggatgccgtagacggcgacagcctcgtgctcacgctcgacgaaactatccagcacatcatggaaaaatacctggaaaagggcgttgaggaaaataaagtttacaaccgcgcggtagctatcatgatggaggtcaagacgggcgccgtgcttggaatggcggtggagggcggctttgatttaaacaagccgtttgaagtcgccgataaaaaggctaaggcggaaatcgaggcgcttccggaaaaggagcgcgccgccgccgagaatgccgcgcttgcaaaacagtggaggaataaggcggtcagcgatacatattatccgggttccgtctggaaaataattacctcctccatagcgctgcaggagaagctggtcaatgaaagctcgcgtttttcgtgcagcggctcatacgtcccgttcgaaggggcgcgcgcaatcagctgccataagcacgggggacacggcgtgcagacgtttgagcaggctatctggaattcctgcaacccggcgtttatgcaaatcggcagccttatcggtgcggaacgcttttggaagtattaccaggcgttcggcttctccgagaaaacgggcatcgacctgccgggcgaaagcgaggatatcttcttcaacgccgacggctcgatgggcccgatggatttggcggtcgcgtcgttcgggcagaacttctcgattacgccaatccagctcgttacaggcatctgcgccgtagcgaacggcggcgatttgatgcagccgtacctcgtgaaggaaatcaagaattccgaaggggaaacggtcaaaaaaattgagccgacggtcaaacggcatgtgattgacggggacgtctcgaaaaagatgtgtgaaatcctcgaggagaacgccgtgtcgggcgccgcgaagaacgggtatatcccgggctaccggatcggcggcaagacgggtacgtcggaaaagctcaccgattcaaacgctgacggcatggaggattacatttcctccttctgcgggtttgctcccgcggacgacccgcaggtcgccctgattgtatatttcgatacgccgaccggcgacaactactatggagccgcggtcgcggcgcctgttttcgcggaaatcatggcggaggtgctcccgtaccttggcgtcaagaccgagtacacggaagaggagctcaagacgctcgatacaaccgcgcaggactacacaggcatggcgctcgacaaagcgcagtccaccgcgcagcaggacggcttccagacgcttgtaaagggcgaaggggaaacggtcgctgcgcaaattccggcggcaggcgctaaaatcccgcagggcggcacggttgtgctgtacacggacgcggcgcaggcgaaggagaactcggtggaggttcccgatttgacgggactgaccgtttcagaggtgaataaagcggccgcgcagaacgatttgaatatcagcttatcgggagcggcggacgacgggacttggatttccaggtcacagaatatatcgccggggacgatggtaagccccgggactgtcataacggtaacgtttgcgcaggacacgagccaggcggaaccgattatgtagcctacatctttcaacagagggaggaaagagtatgcaggatttaaaaaacaactgccggcaggctgccggcgttattgcgattgcgtgcgaaaattcgcttgcccgcgacgcaggaaaggctgtcgagcaggttttggtatcgagcggcctgcatatcgtttcgcgcggcgggagaatcagtacgcttgaggattacagcgtcgccacgattgagtttgaagggctgcccggcgcgcagagcgcgggggctataatcggctccgcggcgcagggctgtgaggaagcgttcttgcagaaatataatcgcgtggttttcccgtataataaggataggaagaaacgccttcccggagacggggcgcaggtaatagaatattcccacgacgaggactgcgccgaccttgtggcgaaaaatatcgtcgaggcagatgaatacacaagctttgagctgctggggaccggaattatcggcaggattaagctccataagggctcatgcctcacggttgaggcggctctcgcgctttccggagctttgctttcggccggtatttcgctttctgacgtaacaaacggcctgagcggttattttgcccaaggggactgacatagtattagattgaggtagaaagcaatggaggttttacgatgaacgttggttggatactcggcagcgcgattgtgtcgtttgccatcgcggcaatcctggggaaatggctcgtgccgtttttgaagaagctgaaatatgggcaaaccattttagatattgggcccaagtggcataagggcaagcagggaacgcctacgatgggcggcttgatgttcgtcatcagtacagtagttactacggtcgtctgcgccctcctttacagcctgcttgcggaggacgaggcttttgcccaggcgacgcttatgatgccgcgcgtgcttgcgggccttgcgatggcagtgctttatggcgcaatcggattttttgacgattatatcaaggtcgtcaaaaagaggaatctcggccttacggccccgcagaagctgattttgcagtttgcggtcgcggcggcgtttttactgacgctcaacctgacgggcgctacttcacaaacaattattccgtttgtcggagcggtcgatttgggctggctttactgggtgcttgctgcaatcctgattgtcggtacggtcaacgcggtcaatctttccgatggaatcgacgggcttgtgggttcgatgacgttctttgccgcccttgcgtttatgctgattgcttctacgcttgcggcccagggcatggggattatgtcggcggcgcttgcgggcggctgccttggcttccttctttggaatttccacccggcaaaggtgttcatgggagataccggctcgctctacctgggcggtttcctctgcgcgctggcgtttgggctgaacataccgattatcctgattccggtggcgcttgtatatttctgcgagatgttctctgttatgctgcaggtcgtttattttaaaatcacgcacggcaagcggttgtttaaaatgagcccgattcaccaccatttcgaaatgtgcggatggtcggaggtcaaaattgtcgcggtattcagcacggtaacggcggtatgcggtattatcgcgcttatgcttgtggttatgggcgttgtcagatgaaaaatatattcagaatatatagaagtgttttatggtggtgtagctaatggcgatagaatatccgctgagatatcaggcagaagaaaaaagaaaagcacaggaagaatacaacaggcgcaggaaggaaccctaccggccgtcagcgcgcgcgcagggcgtgtccgcgcggaccagggacgctggaaagcagcgcggcttccgaaaaaggctcaagctcttttccgtaagggcgggtctcgacatgccgtttttgctgttgattctcatactgcttgtcattggcattatcatgatgttttcggcaagctatccggtcgcttactatacgaccggagacagctacctttatttaaaaaggcagctgctgtttgccgtaatcggcgtaattctaatgctggccatttcatttttcgactaccatcatttccataaaatggctgtctggattttgggccttggctttctgctgctggtcgtcgtgctgttcatgccgtcgcaaaacgggatacatagatggattgaactgggcattgcgggcttccaggcgtcggagctcatgaagttcgcattgatattgtttttcgcccactgggggtctgtctatttttataagatggatacgttcaaatacggcgtcctgcctgcggttgtcatcctggtaccgaccgtcgtgctgctgctcctggagccgcactattccggtattgttatcgttacgctgctgacggtgctgatgatgtttatctcaggcgtcaagggcaaatggttcctgtttgcgggcgttggcattcttctggtgtttggcctgatgtactttaccggccttttgtcctacgcgatggagcgtatggacggctgggggcaggcgcttgaatataccacgccggaaatgtggcagaccacatggcagacgaggaattccatgtatgcgattgggtccggcggcctgatgggcctggggctcggccagtcaaggcagaaatacctctacctgcccgagccgcagaacgactttgtgtttgctatcgtctgcgaagagctggggcttatcggcgcggtcattatactcggtattttcgcgctgctcgtctggaggggcattaccatatccatgaaagcgaaagataagttcggcacgcttttgggtgtcggcctgacttcgcaggtggggctgcaggttatcctcaacatcctggttattaccgacctgctgcccaacaccggcatcagcctgccgttcttcagctcgggaggcagctccctcgttatgctgcttgcgcagatgggcatcgtgctttccatctcgcgcacttctaacatcaataaggcgtaggccttttacgggaagggtttttatgaaaattttgtttgcaggcggcggaactgccgggcatatcaacccggcgctcgcggtcgcgggctatatcaaaaagaaagcgccggacgcggagattttatatatcggcgcaaagggaggcatggaagagcggctcattccaaaggcgggattcgattttaaaggaatcactgtttcgggtttcaagcgcagcttttccctctccgcgataaagagcaacctcgtcacggtaaaaaacgcagtgacggcaagcgcggaatccaaaaaaatcattcaggaatttgggccagacatctgcatggggacgggcggctatgtaagcggaccggtcatacgcgccgcggccaagcttgggattcccaccgtaatccatgagcagaacgcgttcccgggcgttacaacgaagatgctttcaaaatacgtcaaacgcgtcatgctcgccatgccgcaggcgcagaaatatttaaacgaaagctgccgctgcatcgtcaccggaaacccggtgcgcggtgaaattttgacggcggacaaggaacagtcgagaaaagcgctcggcctggacgggcgccccgtcatcctgtcgttcggcggaagcctgggcgcgcgcaaaatcaacgaaaatgtggcggatttgattgcgcgcagcggcaaggatggcaaataccagattatccacgcgtacggccagtacggaacgtggtttcccgacctgctgagagaaaaggggaccgaccccgacaaatgcgggaatctggatatcagggaatatatcgacgatatgccggcgtgccttgccgcaagcgatttggtcattgcgcgcgcgggggcgattacgctcagcgaaattcaggcgcagggaaagcccgccgtgcttatcccgtcgcccaacgtagcggaaaaccaccagtatcataacgctatggcgatggtagaggcgggggccgccgtgcttattgaggagaaggatttgacaggccaggcggttaccgagacggttgaccgtctcgccggcgatgaaacggctttgctcaggtactctgaaaatgcgaagaagcttgcgataactgacgcaaacgaacgtatttattccgtaatcaagaaggtattgggcggtcatatgaactgacgcgccctttgccgtttttatataggtatcaaaaaagtaaaagcgccgcctttaaaatgcggacactgtcaccacagacatccccttcacatagaatatcaaagggttggctattgaggccagagtttagggtgaaagggtgttctgtgtgtcgaaacttattatagaaggcagcagcagattgtccggaaatatagcggtgcagggggcgaaaaacagtgttttgccgattttggcggcgacgcttctttgcggcgaccggtgtgtgttacataactgtccgcagctgtccgatgtggagacgtctgtgaaaatactgcgttatctgggatgtaccgtcgaacgcgacggaacgaccctgacggttgacacacgccccctgagccgctatgatataccggatgacctgatgcgggaaatgcggtcttcgattattttcctgggcgcaatcgttgcatccgccggtatggcgcgcctgaccttcccagggggctgcgagcttggaccgcggccgattgacctgcatgtgaaatcactgcgcctgatgggtatcgatattgcggaccatcatggcattctcgactgtgaggcgcccgacgggctgcacggcgcgaaaatcgcgttatccttcccgagcgtcggcgcgacggagaacattatgctcgctgctgtgcttgccaagggaacgaccatcatcacgaatgccgcgcgcgagcctgaaatctccgatttggcggattttttaaacgcctgcggcgcaaagatttcgggcgccggggaaggtacgatttttatagacggcgttgggcgcctgcatggggcgcagcatgtaatcatacccgaccgaatcgtcgcgtcgacctatatggcggcggcagcggtcacgggcggggagctgacgctggagcatgtggtgccggcgcatctgggctctatcatccctgtgttcgaggaggcgggctgctgtatccgcaacgccgggaacagcctgatgatttccgcccccgaacgcttaaacgcagttaaattcatccgcacgatgccgtatccggggttcccgacagacgcgcaggcgcctgtcatggcgatgaccgcggtggcaaacggcacgagcgtatttgtagagaacatatttgaaagccgctataagcacgtgggcgagcttgtaaggctgggcgcgaatatcaatgtagaagggcgagtcgccgttgtggagggtgtgaaacgcctgtacggcgcgccggttgaagcgctcgacctgcgcggcagcgcggcgcttgtagttgcggcgcttgcggcggagggcgagacggagcttaaggggctcaatttccttgagcgtggatatgaaaaccttgagctttgtttgagcagtgcgggagcctgcattaaaaaagtctaatatttccggtaaggatgacggtggatatggaaaacaacgacgtgaaaaataacggaaaatcaaacggaaacgagcagaagagaaggccgccttcccaaaatggagggaggcctcaaggcgcttccgctaaaaacgcgggccgggcaggctccgaacaggcaaaccgtcagggcgcgggcaaatccggcaatcagggcggcacacgccagggccagggcggtcaaagccgaagtacacagcagggaaggccgcacaacggagcgcagcgccaaaacgggcagaagcgcggcgccaatggcgcgcaaatcagcaatggtgcaaagaaagggcagggacaagcccctgggcagggccagggtatgcgcccggaagctggaagccgcccgccgcagaaaaagggggagcagaaaaatccctccaggccggcacgcgtgcagcagccggcaaacagccaggtgaagaatggaaagaaaaacacggcgccgaaaggtaagcagagaaggcccggcggctacggccgctcagaggagccaattatccgcagggacgattacggcgacggcttttataccgacgaggtggagctaaagcgccggcggcaggtgaaagaggagcgcggcgcgcggcaggaggaagagctccagaaggaaccgatgtcgcgccgtacacgcaaaatgattaatattgctgtctgcggtgtgattgtagctgtcgttttgattacgggcgtagtgctctcgctgacggtgctctttaaaacggaaaagattgcggtggagggttccacccattatacggaacaacaggtcgcgcaggcaagcggcctggcgctcggggaaaaccttttcctcagcgataaggaatcgggcgggaaacgggtagaacaagcgcttccttatgttgaaaaggcagaggtgggcattaaaatcccagacacgattgtcattaaggttacagaggcaaagcccgcttacctgattgcgcagggcgatgacttcgttgtcatcagcacacagggcagggtgctcgagcgcgcaaccaaaaatacttttgacgcgccgattatcaagggctgtgagattacgaaaaccaaggtgggggagacggcgcagattaaggataaaaagatgctgtcgattctcaatgccatcacgcagtcgcttcaaaaaaacaagtttgaaggaatcaaggaaatcgacgtgacggacgctgcggcgatttcgctcaattattcaaaccgcatcaaaattatactcggcacgccggaagacattgattataaaatcaggacagccatggcgattatttcagaaaagctcgcgcagactgatatgggcgtgctggacgtatcctcctgcaacagcgggaaaaaggcctcctactataacgccgacagctcgctgtacccgacggaaccggcaacagagcccgcaacccagccgcagacggagccggcaacggagcccgcgaccgaaccttatcccggcgaaggcggccaggacagcagcggtgacgattccggttcagataccaattatggcgccgataccgacggggatggaattcccgacgattttgacggggacggaattccggattattacggcgacggcggtattgccgacaacgacggggacggaatcccagacgacctggatggcgatggaatcccgggataaccgcagtattatggcggcggttatgcggcggggggatgacggcataatatagaaacctcatcgtcctgaaacgttaaaatggcgcaaatttcacgtttttttaaatttttctttaagaaaagattgaaatttccgcgctcttgtgatacattattcaataggcgtataatcgattgggttatactgaaaaaagcttgcattattatcgtttcagataaagaaactgatgtgtattaggaggaagttcaaatggcattcgagcttgaaaaagagtacggcaacaatattccggtgattaaggtaattggtgtcggcggcggcggcggaaacgcagtcaaccgcatggtgaaaatgggtgttcgctgcgttgagtttattgctgtcaatacagatgaccacgttttacagttttctaacgcttctcagaagattcaaatcggtgagaagattactcacggcaagggtgccggctccaagccggaggtcggcagagaggccgccgaggagaaccgtgaggaaatcactgatgttttaaaggacaccgacatggtgtttattacagcaggcatgggcggcggcaccggtacgggcgcggctcctgtcgttgcagagattgcaaaggatatgggtatccttaccgttgctatcgtgaccaagccgtttgcttttgaaggcaaaaagcgtatggaacaggctgaagcgggtatcgcggcgcttcgcgatcatgtcgattccctaatcgtcgttccgaacgaaaggctcaaatatgcaagcgagcagcgcattacgctgaaaaacgcgttcgacctggccgacgacgttctccgccagggcgtgcagagtatttccgacctaatcctgattcccggccttgtcaacctggactttgcagatgttaccgccatcatgaacaacgcgggctacgcgcacatgggcatcggttacgcgcaggggaaggacaaggcggaggaagcggcccgcatggcaattacaagcccgctgcttgaaacctctatcgacggtgcgaagggcgttatcgtcaatattacggcttccgccgatattgggctggacgaaatcgacgtggcttccgcaatgattaccgaccaggctgaccccgacgcgaacattatctggggcgctgtgctcgacgagaaccttgaggacgagatgagcgttaccgtgattgctacaggctttgcttccttcgataaaaaggaggacaacaggagcagcagccgcgccagctattcccgtacggaggtgcttaggaaccaggcggcttctgtagcggcggcaaaggatgttgcggcgcgtaagagcaacagcgacgtagcggatgatgatgatacattctacgatattatgtccatcttcaaccgtaagtaatttaagaatacataccgcccggtttgcgccgggcggtttttgttttatttgggcaatttaatagggtacggctgccagctgaaccgctgtacgctttgatgaaaaaatgggaaccattgagttttccttgcgaatgagtgcgttcagccaaaaaccagcggcaaaggattataggccgcgccgtatgccgccagccttgggaatggtcatggcgcttgatttaggcattgaattcattgataaattatagtaaaatttatattgctgcaatattgttaaaaaataaggacagttagacgaaccgctgtaaaattaaattggaaccatgaaaatgtactgaaacgactggtttcttcataaaactgccacttatttatgcctcgcgtggtattataggcgaaatacaggcgaggcatctggaaaatatgggagagaagcttttagatggattttaagctagaaagaacaggcctgcattgaacaggccggaaatgtgacaatgagttaagaaaaacggaggattattatgacgacgctttatctggcggttccatgctacaacgaagaggaagtgctttacgacacgacggaaaagctgcttgcaaaattcggccaattgctgtcacagggaaaaatttcgggtgacagccgtattatgtatatcgatgacggttccaaggaccgcacctgggaaatcatctgtgagctgcacgataaaaaccggcttgtatccggcgcaaagctcagcaggaaccgcggccatcaaaacgccctgtacggcggcctgatgactgcaaaagagcatgctgactgcgttatttctctcgatgcggatttgcaggacgacatcgatgcaatcgatagaatgctcgaaaaatatgaagagggctgcgacatcgtttatggtgtgcgcagcaagagggagacggactccttcttcaaacgctttaccgcggaaggcttttataaaatcctgaaatttatgggcgcggaggtcgtgttcaatcacgcggactatcgcctgatgagcaaacgcgcgctcgaggaattcgcccaatttaaagaggtaaacctgttcctgcgcggaattgtgccgatggtcggctttaaaacagcgaccgttacgtacgaacgcaaggagcgcctggcgggtgaaagcaaatacccgctgaaaaaaatgctttcgcttgcgtggcaggggattacctccttgagcgtcaagcccattaaatttgttacgggactgggcgccgttgtttttggaatcagcattattattctgctttggtcgctgatttcccacgcattgggaagcacagtatccggatggacgagccttgtggtttccgtctgggcgctgggcggccttcagctgcttgcaattggtattatcggagaatatatcgggaaggtttatctggaaacaaagcagaggccgcgttatattattgaaacttttttaaacgatgaaccggccggaacagatttgcaggactgagaattgagcagtagaaggaggcggcgggatgcctgtccaaaacggtacgtttgaatcatttatgcttccatttgcaggcgcgcttaaaaaaataaccgtttttattccgcctggatttcaaaaggaatgctgcggcttgatttatatgaccgacagccagaacctgtttggcgcagatgcgccttacggcggatggaaggcggacgaagccgttttatctgagcagaaagctattccctatatgattgttgccgtagacaacgcggatggaaagcgggaagaagagctgacgcccgatataggccccgtgccgcctgcgatacaggcgatagacggccacgatttcagcgtacgcaggggaatcgcgtttgcaaggtttttaaaggaagagctcgacccgcatatccgcgggaaatatcatatctgcccgggtagggccaacaccattatagcgggaagctcaagcggcgggctggaagcgttctatgttggaatgcgttaccccggcacatacggctgtatcgcggcgctgtcaccggcgtttttcctgtttgaagaggacacatggaaacgtttttttgaaaagctgcagcctgcccaaaagaaacatattccgtacctttacctttctaacggggcgggcgactggctggaaaccatacttctcggcgggacgcgccgtatggagcagcgccttatttccttggggtacccgcgggagaagcttttatatgaagaaataccggaagaaaagcataatgaagaggcatggcgcaggcggtttccgcaggcgctgcgatggttcttccaatacaacgaggaggaaacgtaacatgaaaaaaatggtggcgcttcttttgacagcggcggtattgctcccctccgtcctgctttccggctgcagcgggaacggcgaaggggatatacagtttacaaaccctgtttacgacgcgggcgacgcggacacgaacaaaaacccttaccccggcatggagcttgaatattacagcgattcacagacggaggaggactcccgccagagggctgtcgtcgttacctcgcttgacgaaatccgcgacgatatgatagggagcggccttgatgtccagagcgtcgaatatacagatgtgcagctttcggatttcgacaacggatttgtcgcggacatcacaatgaaggtagagcttgcggacggaaagaccgctgacaggcatattcttggctattttaaaacggtacgcctgcctgacggcacgtaccgtacctattttgtctactaccatgacgtaaagccggatgaaaaggtggacgataagtcaaaggaagagcttctcggtgaagtgatggataacgtaaagcctccaaaggacaatggcgccagccagagtccgccgacctcttcgcagggctccaaaaatgaaggaggctcgcagagctcatcctcacaggcggctgagagcggcggagatactgatgaaatcagcagtaagccggagcctatcagcgaggtagacgccgacgaggtgttttaagaatcgcggttttatattggtggggagtccaaaaacgccgccctggactcatacctccagggagtgtggattgaaatccatttctagccatttctgcatgaactcggatagcgtctccccatgcgggagcgtggattgaaatatgcgcttcgcgctccttttcctcccgggatttgaggtcgctccccacgcgggagcgtggattgaaatcgagcggtataaaaaatcaagcctctccatcgtgtcgctccccacacgggactgggcagagcgaaataaagccgtatcgctataaaatgagccagcgttgtttgacgctggcttttgtttgcttttatttaattggccagggaaaggatataccgccgcgccggaatttacggcccgttccttctcaggcctggcttttggctgcggcagaactcggtcattgtatcccagtaacgctttggcatatggttcatgcggcatttggggttatagcgtccttcaatggcgatggtatcgtaataatcacaccataaatcgcggtacatctgctcctgctcgtccgggccgtccataacaaaggaatctaccggaacaatcgccgactcgcccggcctgtggacgagcgccataccgtgggattcgtcgtaaattaaaaaagcctcttccggataacggtcgataaaatgcggcgcaatgaggggcagcacctgattcatcggcttgataacagcggtgagtacccgccctgttacggaaaaccgcaggaattgcttgaaccggtggctttcattgtaaaggtgcttctgcgcctttaataaggtacagaccgtatcgtcctgcaaaagctttatgacatcgggcccgatggaaaagcccatctgcaaaaattgcagcataaaaagctccttgtgctccaaaaaggtcaggaacacatgctctgtaagctccattgcctcgcgtgaaatcttcagcggaatggaacgcctgacccgcgctgccttatgcaaatccgtcttgaccggccttaatgggttgagtgtcaattggggcgcgccgtccgcctgtatctcgagcggcgtttccctgcgcgcaaagctttcaaacacacagcataaaaagccctcgaatgtcccgtcatattcatagcctacgctcccgcggtcaaacatgcgcgtacctcctccgcttttatctgcccatcctgaaagaggctgagctgctcgtattgctgcggcgcctgcccgcgaatataatcgagcccctgctgggaaatcaagctgcgtaaagcggtatcctgcgaaattacaagaccatcgttgagctttccgttgacggtgataaaatactgtgcccgcttgagcaccacccccatttttttcaacccctcgtagctgagcctgctgaccctgcgcgcggttaatatgcgttttgcgctcgttacgccgattcctggcacgcgcaaaagcgcttcgtacggcgcgcggcttacctccagcggaaaacgctccatatggcttaaagcccagttgcatttggggtcgaccagtgggttaaagctctggtgctgttcgtcgagcagctcgtcggcttcaaagccgtaaaagcgcagcagccagtccgcctggtagagcctgtgctcgcgcagcaggggaggcggcgtgtttaccgccggcagcagcgggtttgatgcaaccggcatataggccgaaaagaatacgcgcttgagccggtattttttatacagggcgctgcttagcttcagaatttgaaagtccgtgtcctcagtcgcgccgataatcatttgggtgctttgcccggcgggggcgaatttcggtgtgtgccggtattttaccagctcgttcttattttcggcaagcttgccggtaataaagcccattggctttaaaatagaggttttggatttgtcgggcgcgagcatggcaaggcttttttggcttggcagctctatatttatgctcatgcggtcaacaagtagcccgagccttgtaagcaggccttcatctgcgccgggaattgcctttgcgtggatatagccgaaaaaacggtattcgtcccgcaggatttcaacggtcttgataagctgctcacaggtatagtcagggcttttaatcacgccggagctcaaaaaaaggccctcgatgtaattccgcctgtaaaactggatggttaggtccgcaagctccctcggcgtaaacgcggcgcgtggcacgtcgttactgcgccggttgacgcagtaagcgcagtcataaatgcagacgttggtcatcaataccttgagcagggatacacagcggccgtcggccgagaaggtatggcagataccgcagctcactgcactgccaatgccttcttttccatttttccggtctacgccgcttgaagtacaggctacgtcatatttggcgctgtcggcgagtatcttcagtttgtcgaacatatccatacggtacccctcccgatatatacagtatacactcgaacaaacgttttagtcaagagaaaacgaacatattttcgtaaattataataaacaaaaccccgccggaaatccggcagggtttattttctgttaaagggcgtatccgccgtccggttcggcgccgcatagcaatagcgccgcgcaggtagcaagcagcgggtagacttccatgcggttttcaaacgtaacgatgatgtcgcggggttcgaccctgttcccgtaaatatcgataagctcccgctgcaggctgacggttgcgcgtgattcgctgatgcttgcgatactcagcgtgtcccgggagccggtgccgcaggtgatggcgacacgccctgcttccttcaggcgggacagcgcctttttgttgtcgctgtcgagtaccgggataagggtttcggaaagctcaaagctgccgccgcttttaaagccgtcgtcaaaaacaaggacgccggttataccgtatgtgtgcggtacacaggaggtatggcagagggaaaagagcgggctttcgcagctcgatttcagctcattgcggcaaaagctctgtacgccgccgttttgggagagcgcgcggtacaaggcgtcgaacaggtcgtggtctttacggcaggaacaaagcgctacaactggcattccactcatccatttctgtcgggtttatgtaaagccgcggatgtaacaatattatttgattttatggttcatatatacgcggctttttattccataagcgtgcggattgtctgctcctcggcaaagcccctcgcggctcccgattccccgattttatatgaagcgaaggtcacggcaaagcgcagggagaaggccgggtcttttgtaatggcgtattggtgcaggaaagcggagaacagcgcgtcgcccgcgcccacggtgtttatgacgtccctcgtctttacagcgggctgtaaaacaatctcgccgctttcttttgtatagagcagcgcgccctttgcgcctaagcccatgacgataatatcattgccgtataaccctgctatttcgcggataaagtccttcgggtctcccttgaccgcttcgtcgctcataaacaggatatccgcatagcgcataaaatcggcgttaaacacgtcgtacaaatctgaaacgacgtgcacgtcggtggcgatggtttttcccatttccctggcaagctttaaaagcgggcggttgaagtttatattgcagagtaccgcgatgccgcacggggcggcggcctctttgaattttgggatgctgcactgcgtttcctggatatccttcaaatcgcagtaaatctggcgttttccctccttgtcgtacaatacgaccgactgcggcgtgcttttaagcccgggttctatatatttactcgaaataccgcaggaaagaagcgtctgcttaatcaggcaggcgctgtcgccgccgcccgtcagggagaaaaacgtcacgtcgtccccaagcacggtaagggccttcgctatattgaagccgacgcccgatacagcggtttccacgccaaaaaaggggaagaggattgggcagtactggatggggaagccatcgacttttacagtggtttccgtattaatcaggccggacacaaatagtttattcattatttttctcttttctgtcaatttatttatggtatactgaaattaaataaaatggcgcggcattgcgccgggcatggttaagatatccttagtttacaataaatccaaaaaattgtaaacagacaggggaaaaccgtgccggaaggagcggataccatgaaggatatgattattatcggcgcggggccggcgggcctgaccgcggctctttacgcgctgcgcgcgggaaaggacgttttggttttcgacaaagcggtatatggcgggcagacggtcaacacgccggaaattgaaaattatcccggcataaaaacaatcagcgggacagatttcgctatgcgcctttacgagcaggtggaacagctcggcgtgcagtatgaatacggagacgtacttcccgttgtgctttcgggcgcggaaaaaatactcagcggcgcaggcagggaatacagcgcccgtacagtcgtgattgcaaacggagcggtgcgcaggaagcttggctgtgaaggcgaggaacgcctgacaggaaagggcgtttcgtattgtgcgacgtgtgacggggcgttcttccgtgataaggacgttattgtcgcgggcagcggcaatacagccatagaggacgcgctgtatctttccaacatctgtaaaaacgtgacgatgctcatacgtaaggacatcattaagggcgagcgtatggccgcgaagcgtttacaggaaaaacaaaacgtcaaaatctattttaaccagagcattacaaaaattacgggtgaagacaaggtggagggcgtggagacaaccgaccgcagcacgggtgaaaagcggttttacaaaacggaggccgtgttcgtggcggttgggctgataccttcaaacgaagtgttccgcaggtttattacactcgatgaaaacgggtatattgcggcgggcgaggactgcaaaacgaatatagaaggcgtttttgccgcgggcgatacgcgcaccaaacgtttaaggcagattgtaacggctgctgccgacggggcggtcgcggccgcttatgccgcggaatatctagataaaatgggattttgataaaaaatatgttgattattgtgtgaaccggcgttatgataagaacagaagttaaaaatagcggaggtgctgttgtgaaccgaatcgacaagaagaattattatctggacattgcggaaaccgttttggagcgcgggacgtgcctgagaaggaatttcggggcgattatcgtaaaaaacgaccagattatctccacgggctataccggcgcgccgagaggcaggaaaaattgtatggatatgggcgtgtgcgtacgtgaaaacatgaaggtgccgcgcggagagcggtatgagctgtgcaggagtgtgcatgcggaagcgaacgccatcatccatgccgcgcgcaatgacatgcttggcgcgacgctttatcttgtcggaaaggacgcgaaaaccggcgcctatgtggaggatgcgaactcctgcgccatgtgtaaacgcttgattatcaacgccgggataacgcgtgtgattatccgcaatacaaaggatacctttaccgctgtttatgttgattcctgggtggaaaacgatgagtcgattgagggcgcttccggatattaaaaaatgaaaagcagaaaaacccccgctgtgctgtcgatgcacggcgggggttttatcatgttttggaaccggacgcatatatttttagtggctgtgcaaaatctttgattttgcggcgcgcgcagcgcgctggctgccctgcgggcaaacgcacagccgcgtaaaatatatggcagcccgtttacgggcgcggacggcccccgctgtttgaaattatctcccgcgataaatttccctgcggcagtcctcacagatgattttgccgcggtaggtcgtaatattgtcggcgcttccgcaaaagatgcagctgggattatacttgcgcattgtaatcccctcgctgtcggtaaacaattcgaccgcgcagcccttatccagtccataggatttcctcaggggcgctggaatgacgattcttcccaaattatcgatgttgcataaaaatccggcaggtttcatgattttaagactcccttcccttgtttgtcttataaagtttgcttcctctcttgagctcgactttattttaccaaaaagtggtattattgtcaataattatctcatttttgttatttttacaaattttgtcgaaatgagtgacggtttatgatgaattatatctggggtgcaatcctgctcatcagcgtcgtatgcggcatcataaacggaaaaaccgcacagctcagtgctgccgcgcttgacggggcaaaggacgctatagagcttctgcttaccatgtgcggtatgatgtgcctgtggtcggggctgatggacattgccgagcagggcgggctgaccgcggtgcttgcgcgggccttttcccctgttttaaagctgctgttccccgattataaaaacgacaaagaaacttccggcgcaatctgttcaaacgttacggcaaaccttttggggctgggcaacgcggcgacgccgcttggaattgaagcaatgcgccgcatgcaggtgaaaaacccgcagaacgaaaccgcaaacaacagtatggtgatgtttgtcgtgattaatacggcgtctattcagcttattccgacgacgattgccgtgctccggcagaaatacggctctgcttcagcactcgatatcctgccatgcgtctgggtgagctctatttttgcccttgcggtgggcattacggctgcaaagctgctgcaagcaaggcgaggtaagggaaaggaggcatagggcttggagcagtttggcgggtatatcatcccggtcgtcattgcggtgattgtactttttggttttatcaaaaaggttccctgcttcgactgtttcctcgagggggcaaagcaggggcttatttctacctacaaaatcgcgccgtcgctcattgggctgattgtcgctgtgaccatgctcaaggcttccggcgcgcttgatatgctgatacattttatagagcctgcggcgacgctgctgggctttccggcggaaataatgccgcttgcgcttctgcggcccgtttcgggaagcggctcgacagcgattttaaatacgattctaaaggattacgggccggacagctttatcggccggtgcgcgagcgtgatggccggctcgacggaaaccacgttttacgcgattgccgtttattacggctcggtcgggattaaaaaaatccgccataccgtgccggcggcgctgtgcgccgattttgcgggcatggtaatggcggtgctttcagtgcggtttttcttccggtaaggtcatttgctcaattgcgggcggatgaccttatggagcagcttttttccgttgaagggaatcagcggatacaggtagctcttgccggaaaccgtcttatttgtaataagcaggacgataatcaggacaaaccctgcgataaagccccagatgctgaacagctgcgtgagaatgagcagcatgatgcgcaggaacttgagcgaataccccagctcgtagctcggctgcgtatagttcgcaattgcgacaaaagccatataaagcatggcctcggttgaaaaccaaccgactgtgacggcaaaatccgacagggcaatcgcgccgataatactgagcgaggtactcaggctgttcggtgtattgacggacgccagccgcaggccgtcgattccgagctccaggataatcaactgccaaaacaccgggatattgaccggctcggtaatcaggataaattcaaacgcctttgggataagctcgggatttttcagtgcaagcagccacaatggcgtgatgacgagcgtagcaaacgtgacaagatagcgggcaaggcggatatacgtgccggtaagcggcgggaaatagtagtcgtctacctcttcgatgatatcgaaaatcgaagtcggcagcacgagtgcagagggggaattgtctactaaaatgatgatattgccctcaaggattgcggacgcggcgctgtcgggccgttcggtatatttgaccttggggaaggggttataccatttgtgcttgtaaatggcttcaatcaggctctgctgattcatggtcagggactttaccttgatgttgttgatttcccttgtcagcttgccgagcagctttttatcgacgaggttgtccatgtagcagacagccacgtcggtcctcgagacgctgcccacgacaaacgggctgacggtgagctgcgggtcgcggatgcgccgcctgataagcgccgtattgcatatgagcgtctctacaaagccgtcctttgagccgcgcagggatttgtccttttcaggctcgcttgtttccctttgggggtaagtgcggctgtcaatcattatggcctgcgtaaaaccgtctacaaagagagccgttacgccggacagcacgttcatacagattttgtccgcgtcgccggttaggtcgacctccacatagggtacgcaggtcttaataaaggtgtgtgcgtcggccatggcggaatcgtcgtcgatggaatagaagaattccattaccttttccatgacctcgtcctttaaaaggccgtctataaagaacatgcaggcgcgccgcttgttgatggtaatggtgcggtaaatcaaatcaaagctttcctttgcgcgcagtttttctttaaagagcttgatgttgtcgtcgatattgcttgaaaggctcatagcgtcaatcctttctgccggaaaatgtaaaatacttcgacttagtttatgtaatccgatttgttttatcaaaaaaattaaaaaacaggcgtctatactgcggttttatatttataattcaatatttttcataaaaattgttgacaaaacacggaataagggttacaataaagaaaattttatccggtaaaccgaagagtaagaggagtaaccgcagggtgaatgcccgaaagagagccgcggacggtggaagcgcggcgggtgtttgtgcggcgaatgggcttacgagggcaaggtgaacattgcagtagccgagccgggagcttcacccgttatcaaggaagcgcgcgttttttgacgtgcggagcaggaggattttataatcaatctgggtggtaccgcggaagttcgctttcgtcccttgtggacggaagctttttttatttgatttttaaaaacagaaaggagtctttactatggcaaaaataccttataggttttatttatcggaggatcaaatcccgaagcagtggtataacctgcgcgccgacatgaaggaacagcccgacccgatgattaacccggcgacgatgcagccggcgacggaggaggacctgtaccccgtattctgcaagaagcttgcccatcaggaaatggacgcgcagacgcgttatgtagacatcccggaagaaattatggagatgtacaaggtgtaccgcccgtccccgctgattcgcgcgtacaacctggaaaaagagctgaaaacgcccgcgaagatttactataagtttgagggcaacaacacctccggcagccacaagctcaattccgcaatcgcgcaggcatattacgcaaaggaccaggggctcaaaggcctgacaaccgaaacgggcgcgggccagtggggaacagcgttgagcgaggcgtgctcctatttccatctgccgctgaccgtctatatggtgaaggtttcctatgagcaaaaaccgttccgcaaagcggtaatggagacgttcgacgcaaacgtcatcccaagcccgagcacgactacgcaggtcgggcgtaaaatcctggaagaaaacccgaacacctccggcagccttggctgcgccatatctgaggcggtcgaaagggccgtttcgacggaaggctataaatatgtgctcggttctgtattgaaccaggtgctgctgcaccagtccattattggcctggaagcgaaaaaggcgatggaaattcttgatgagtacccggacgtcgttatcggctgcgcgggaggcggttcgaaccttggcggccttatcgcgccgtttatgcaggataagctgctcgcaaagacagacccgcgcatcgtcgcggtggaacccgcttcctgcccgtcgcttacaaggggaaaatacgcctacgatttctgcgatacggggaaaataaccccgatggcgcgcatgtatacgctcggcagcggtttcatgccatctgccaaccatgcgggcggcctgcgctaccatggtatgtcgccgattctttccaagctttatcacgacggctatatggaggctgtttccgttgagcagacgaaggttttcgaggccgcgaccatgtttgcaagggtagagacaatcctgcccgcgccggaatctgcccacgccatccgcgcggcggtcgatgaggccgtcaaatgcagggaaacgggcgagcggaagaccatcctgttcggcctgaccggtaccggttacttcgatatgacggcgtatgccgctttccacgagggtaaaatgaacgattatatcccgacggacgaggatttgcagaagggctttgacggcctgccgaaaattccgggcgttcaggactaagctttatatcaaaaggggagggaaaccattcatggtttccctcttttaataattttaagggcgctcctcgttttatgtgcggggcgcaggacaaaaaccttggaatcacctgccgtaccagcgcacagagtatttcacgggtatagtccttcatacagtttttataaggcatcagtttgattttctttttcatccgctttcttttgtgcaagtggttggaatgcttcagaaggggttaatccataaaaattgcataccgttataaaaggagagaatcttgtggatgtattaaataaaataaggcttcttatgaacaaaaaaggttggtctgaatatcatttatcgcgtgtgtccggagttccgcaaagtacaattaattcaatgtttagaaacagcaatttacctactattacaacactggaaagtatctgcaaagcctttgacatctctttatcagaattctttgccgatggggagaatctcaattctttaacaacggagcagcgagctatgtttgataaatggtcgcgattgacgtctgaacaaaaagagcttcttttaaaattaattgaacaaatggattaattggtatcagtcgtccatttgtgtttgttatctatggagcggtattaataaaaaaggacttgccacacaaagcggcctgtgcgcgggcgcagcgctgtaacactcgtactatctattctttaagccccgcatattaaatgaggagcaggcgggcgcgatttttataaccggggatagtaagggccgcagtacctttcccggctggaaaaggccggcggataaccgccgagctggttttccttttgacagaaagtttcatgaaaaaattaaaaaaacagcatgttttgataaatgcgggataaaaaaggaggaaccaataacggttcctcctttttgttaaagcattccctgcacaaacgtatactttgttttcgtccagttggttgcgttcacatagtcgcggtggtaggatgagttgtccgtcggggacgggatgttcgacggcaccagctctacacaaaggccggggcggttatacgcgccgcggaaccaattttcaagaccgccgccgtagtcgtttgccaaagtggatgtctctaccgcccagtagccgcatttgtttacaagcttctgcgtcaggtcccaatcgcccgagactgtgccgctggcgctgtcgcgccaataaatgcaattgccgcgcaggtgcatggaaaaaagccattcaaagcggttttgtttgcaaaggttcatgatggcctttgtttccgcctcgctcccggccgcagggcccttgtatctttgcacatcggtatagcgtgtgctgatacccccgtcggtgatagagccccagtaaaacgggaagtttctgtttaagtttacgccgttcgcattggacttgaattccatgcggctgccggtatatttgtaaagcgggtttgtaaacttcgtcacgacatccataccgtcggggttcatcagcggcacgatgtaaagcgtgtagctgtcgagcagctgcttcatattataaccgccgtaggcgccagttttagagcagtaggccgccgcgtattcctccaggcaaagcatcgtaaaggtgacggtcaggtgctcgcgcgagtggatgccgcctgtaatcagcgcctttttgcttccgtgcccaagctttacaagcgttaagtcctgcccgagcgtactctttccggcggaggataccgtgacggcgtccggatattgctttgcaatcagcccggcgtcacggataacctcgtctgtggtataggcttttgtataatcaacgatgcgtgaggtaatggtgcagctggcgctcacgccgttgtatgccttgcaggtgattaccgcggttccgcgcgtttttgaggtgattacgcccttgttgtctaccgaagcgacggcggggctgcttgaagaatagcttaggatattggctgccgcgcctgagttgagcgtggccttgagcgcaagcgtctgcccgatgaaaagcttttttgacgtgacgttgagcgccatcgaggaaggcgcgttttttacattgattttgcagcttgccttttgatggttttccgtttctgctgtaatagttacgctgcctgttttcagccctttgaccgtgccgtttttatcaacggaagcgatggacgtgtcagaggaggaaaattgcaggccctttacataagcgtccgccggggtagccctgacgggaaggcggatgctttctcctttgccgatggtataggacgcgcctggaaacgcgatgcggtcggcacgtttgacgacctcaaccgtgcataccgaggttttgccattatggcttgcggcagtaatctgcgcggttccataggtttttgcggtaatttggccgttcccatcgacggcggcaatgcttttgccgctgctttcaaacgtgacagagcggtcggcggcattttcaggcagcaccaaaacgtccaggtcataagtctgccctgggtaaaggtaaatcaggccgggtgttgtaaacacgaccgattccaccggaataccggttggaggctcagtgggaaccgtagcctccgtgggagggtcggtctggtttttaagctcttccagccttctgcttgtatcgagaaaatcctgaaaggtgtcctttacgggatttcccgtgctttcccgcgcggcgtagacgttaagaaaggcgcccgcgcacagcaggacgcacagagcggcggcaattatttttttcataaagcttcctccttgccacatatatcttccaatataatcatacgatatttctacaaaaaccgcaatgaaaaaatctcagtttttataattccattgtacaagctgccccttttcgcgcaaactggaattcttcccaaccccacgcggtttttccgtaaaatttattttgtttttatggattgacaaattgacaaaatgttcatatacttttaccttggagtgattcacttgtgcgtaacgcgcaaagggacacaaattctttttaattttgtttgggggtggggatttgagccagaataccgtcgtatccttaaaggatatttacgtggaatttgacggcgaggttatcttaaacggaatcaacctcgacatcaaggacaaggaatttgtcacgctgcttggaccgagcggctgcggcaagacgacgacgctgcgcctaatcggaggttttttggagccgaaccggggcgaaatttattttgacggcaaacgcataaaccaggtgcctccgcataaacgcaacgtaaacacggtgtttcagaaatatgccctgtttccccatctgaatgtgtttgaaaacgtggcgttcggtttgcggattaaaaaggtgccggaggcggaaataaaaaagaaggtcaggcagatgcttgcgaccgttgacctgaagggctatgaaaagcgtcctgtcagcaagctttccggcgggcagcagcagcgcgttgcgattgcgcgcgcgctcgtatgcgaaccgcaggtgctcctgctcgacgagccgctcggcgcgctcgacctaaagctcaggaaggacatgcagcttgagctgaaaaacctgcagcagaagctccagacgacgtttgtatacgtaacgcacgaccaggaggaagcgctgacgatgtctgataccgtcgttgtgatgaacaacggcaagattgagcaaatcggcgcgcctatcgatatttataatgagccggcgaacgcctttgtcgcggactttatcggcgaagcgaatatactaaacggcctgatgcttgaggaccgccgcgtaaaaatcggcggagcggagttcccctgtgtagacaagggctttggtaagaacaggccggtcgacgtggtcatccgcccggaggacgtcgagattgtcaagccgcagggcgcaaagctttccggtacggtcacagacacggtctttaagggcgtccactatgagatgtccgtctcggtaaacggctgtatgtggctgattcacaacaccaaaagcgtggagccgggtacggaaatcggcattgaggttgtgcctgacaatattcatatcatggataaactgttcccaaccacggacaacgagttcgacgcggtggtcgtgtcctcaaatgctgaggagaacagtatggaagttgaaatagagggaaaaagcgtcgcggtcaagggacgctgctatccccaggatacaaagctccatgtctccctgccgcctgacggcgtgtatatcgcgggcgacggaacgggggatttggaagcctatattgaatccgtcatctggaagggcgagcataacgaaatcattgtggaaaccgacgagcacaaatggctgatgagcagtgattttgacgagcagattgcaacgtatgtacagctgagcttccggttcgataaggcggtgtttaccgaaattgccgcagaagggcaggtggacgcaaaatgaaatcaaaagcgccatcttacccttaccttttatggatgctcgtatttacgattattccgcttgctatggttgtctattacgcgtttaccgacagcagcggcagcgtatcgctaaagccctttattgacagcctttattattccgacgtattcatccgttcgctgtggattgcgctgctttccaccgtgatttgccttttgattgcgtatccgcttgcctttattacggcgcgggcgcgcaaaagctcgcagaaggtgctcgtcatgcttttgatgctgccgatgtggatgaactttatcctgcgcatttacgcatgggtgctgcttttgcaaaacgacggcttaattgacctgggtgtaaagctcctggggctggacattgcgcttttaggcaacagcggcgctgtcgttttgggtatggtttataactttttgccatttatggttctgcctatctatactgtcatgacaaaaatcgacaacagcctgattgaagcggcgcaggacctgggctcaaacagtgtacgcgtattcggcaaggttgtgttcccgctctcggtgccaggcatcatttccggcatcacgatggtattcgtcccggctgccagtacgtttttggtgtcccagtacctgggcggcacgaacgacaagctcatcggcgacgtgattgagaacattttccagcgcgacaagaacgtcggctcggcgctgtcgctgtcactgatggtcatcatcctgatattcctgattgtgatgaaccgcttcggggacgaggaggtggtcgtatgaagaagctttcctcaaaaatttatgtggggcttgtcatgcttttcctgtacctaccgatttttgtgctgatactttactccttcaacgacggaaaaacctccgtatggaagggctttacgctgaaatggtattcggagctgttccatagcaccgccattatgtcgtccctttacaatacgctgattatcgcggtgctcgcttccctcgttgcgacggtgctcggcacggcggcggcaatcggcctttataactataagggaataaaaaggacgcttctaaccaatgtttcaaatttcccgattatcaacccggaaatcgtcacgggcgtttcgtttatgctgctgtttgccttcgcgggcggccttttgggctttgaaatgggctttggaacggtgctgattgcgcatatcggcttttgtacgccgtatgtaattttaaacgtcatgccaaagctccggcagatggacaaaaacgtgtatgaggcggcgctcgatttgggctgcaaccagcgccaggcgtttttcaaggcggtcatgccggaaatactgccgggcgtactgtcggggctgctgatgtcctttacgtattcgctcgacgatttcgtcatcacgtattttaccaggggcgcgcagttccagacgctgccgattgagatatacaccatgctcagaaggaggatttccccaaccatcaacgcgctttccacccttctgttcgtcattaccctgacgatattaatcatcgtaaacgtccgcgacaggcacgccgaaaaacaggcggccgctccgcggtaaagggtttgcgtggatttataaaccaaaaacgagagggaggaacaaaaacatgaaaaaattactttgccttgcgctgtgcgcgctgcttaccggggcctgcatgcttacgcttgcgtcctgcggctccggtgaatccgccggggaaattaacgtctataactggggcgagaatatcagcaacggcgaggacggctcgatggatgttatcgcagaatttgaaaagcagacgggcatcaaggtcaactataccaattacgagacgaacgaggaaatgtacaacattctgaagaacagcggctccgcttacgacgtaatcatcccgtccgactatatgattgcaaagcttatcgcggaggatatgctcctgccgctcgatttcgataatatcccgaactacaaaaacgtaatggagcagtacaagaaccttgatttcgacaaggataacaagtatagcgttccttatacctggggtgtggtcgcgctcgtctataacaaagagatggtaaaagaaaagcccaagagcttcgacgtcctttgggacaaggagtataagggccagatactgatgttcaataactcccgcgacgcgatggcaatcgccatgaagctcaagggcatcgacccgggcgttgtgaccaaggaggacgtcgatacggcggccggttacctgcgccagcagaagccgctgctgaaaaagtacgtaatggatcaggtctttaccgagatggagggcggccaggcggcgcttgcgccgtattacgccggcgacatcatcacgatgatgggtaacaacgagaacctcgattatgtgctgcctcaggaaggctcaaacctgttcgtcgattcgatgtgcatcccgaagacgagcaaaaacaaggcgcttgctgaaaagtttatcaactttatgctcgagccggaggtcggtaaggcgaattccgagtatatcggctattccacaccgaaccaggctgcttacgatttgatggacgaagaagtcaggaacaacgagcttgcctacccgccgaaggagtacctggataaatgttacttcttctcaaacctgccggacgacgtttacaattatttgcaggagcagtttttacaggttcaggcataaccgtttaacatggacaatggtaatcccccggcaggggccgtcactttaccgagtgcggctcctgccgggggaattttattgactgtttactggacagtaaagattcttatttatccggttcagcctgcatgcctggagccaaagaacaccatcttacgcaaacaatggtcgcaccagaaatccggcttctgcgcataaacatttgcatataccttatttgtactctggcagcattcccagatttcttcataggggtccggaatgtctgcgttatgatgcggcgccgagaaggtatgaatgaattcatgcgccattacaccgacattataactcgtaccttggctctgggatattgtaatgacaaacgccgaggcgcccggtgagtaaatcgcctggccggaaatggtgccggttgcccctgagtgcagggaggcgtaggttccgggatgccgcgattgattataattattaatccagtataaattatttccccagtttttatgtttttcctcatgcggacaaattgaagtgttgcctgaggcacattcgtccacgggggagaatactttttcgtagctgacaatcatgtggatagaggatttggcgtaaatcgcctccgccaagtcatcccagtatgccttgagcttgttgacggcgtatgtttccgcattttcttcgattaccgtttgttcggtatcctttgtcacccgttcaagataccactcttcatttgcatcgccgtagtaaccatattggacaacctcgtcgccagcctctgttccggcccagtaaacgttcaggcccttagagaaattgctgcattccgatgtaatccggtatgagggcttgtcatcgttgggattttttctcgttagcttgaaacgcataccgctgctgttatcgtatgttttcagctcgatgtctgcattgtttatattttccgccgggttgacggaaagccccctggtgctgttaccgagcatagtcataatcttaaaggtaccgttgcccgcggggacaaacttccatctttggccggcttggttatttcgggtccattgaatgatatttgcgccatccgtgtcgctggcccaatatacatccagatacaggccgctgtttttgttttttatataatattcaccgtctgtaatggaattatcggaaatgtaatggttgtcataataagaatggacctcaatcgccggttccaggacccatgcgtcgttccacccgtcgttataggtatattggatgatatttgcgcctgcgttaaaggatgcggcgtaaacagttgcgcatttgctgtagttgctgctcttcgtaagcaaacggtatgtgtagccgtcgctgttcattacaattttaaactgcataccgctgttttgcgcatcgtattcgctcaatacggccttggcgtcgtttgccgacgcggcattctggatagagagcgcaagctccgtatcttcgctcacatccgaaatcagtttaattccttcatccgtatttacaattcgccatctctgcgtaaccgagttgggattgagcgtttgctggataatctgtgtacccggcacagtatggccattttgcgtgtccagatacaggccgctgcgcctgtttttaatatagtagcgcttgttgctttcaatctgcataaccggcctgtccttttccaaaatccagctgtcattcaggccattgttgtaagtatattgaataatatttgcattgtgggcaatactggcggcgtagacggtgacacatttttggtaattggttggctttgtcaaaaaacggtaggattgcccgtcggcgtttctttccagcttgaattttaccgcaccgcttccgtcgtcatcctgaattttgatgtttgcgttgttcactgtggaggaaccgtcaaccgccagtgccttttggccggccgcgtttacaagcatgtaggttccgtccggctgctgttcaaatcgccatttctggctttcaagtgcaagaaagtgggtttgtacgacattggcgccgtcctcagccacatcgagatacataccgctgtttttgtttttgatgtagtaggtgtcgccgtcaatcgatgtgggcgtatgctgcgggtcgaacgcggaataatcgtctatcggtgattcaaaaaaccattcctcgttccagttggcgttatatgtattctggacgattctcccaccattcgattggctcgcgttctgcacagcaaggacttttgtaaagtcactgcattgggaagcgattttgtagcttcccagctccgaaaccttttcaattgtaaacagggtgctgcctgcggctgttgactgaggacgcaaatccgcgtatgtaccgtccgtattgttggcgggggtaatggcaattaccatcggcgtttcgcctgcaagcgatacaagcgcatatttcccgtcaccgtcagggtcgctcagaacccacttttgatttgcgtttccggtataggcagcttgaataatagacgctcccgcctgtgtgccgctacctgaaaccgtcatatattttccgctgctcctggccctgataaaatacgtccggccctcaagcggtttttccgggtcggtatagccgtatggccgatagctgtcgcctggttctccgctgttggaattttcctgtaccgcacccatagagacaacggcggacagaataagagcaacagataatagaaccgtaattgctgttttccaaatgttttttgccttcaacatattttcctcctttacctcgtccaaacgtttccgcgaaaataaagcagggattaaaacactggagccacccctttcatatttaaaacttgttatgttttacccgattccaattatagacatttttatcccagaatacagcaaatagaataaaaatatgtctatttatattaaaaatttattaaatatgtgaaagcaaatcacatgttaaattctcgtaaacaacgctgcattaaatatgcaatttaaacaagcttgattttcataattttacagcgaatcggcccgttactttccccttgggcgaccatactaaaggatggaggcgattattttgcaactgtttacagccgtttactatgagccgcagagcctggaatatccgcttgggaaaatgctgcgggaaaaatataaagatttgccatggattccgattgaaagccataaccgcattgaagaaatgacaaagaaaaagaacagcgattttcctgaaatgaaacgctttttaatcattggcacgcggaaaacgcacaaatattccgataattttaaggtgtcggactatttggtgccgtttacatcgagtggatgcaccgccatgtgcctgtactgctatttggtttgcaactacaacaaatgtgcgtaccttcgcctttttgtaaaccgggagcagatgctggagcgcctgataaaattttcatataaaagcgaagaggaaaaggtattcgaggtcggcagcaacagcgacctgatattggaaaatacgattactggaaacctggagtggctgattcctgaatttgcggaaaaggggcgcggaaagattacgtttccaacaaaatttgacatggttgggccgcttttatcgctcgaccaccgcggaaagacaattttccgtatgagcgtcaacccagaaaaaatcatccagagaatcgagcttggcacatccccgctcgaaaaacgcattgacgcgctcaatcaaatgtgcgaggcgggctatccctgcggtatattgattgcgccggtcgtgctggccgaggattgggaaacgctctacagcgggcttcttgacacgctgcacagccgcctttccgaaaaggtaaaaagccgtttatttattgaaattatttttatgacctacagctatgtgcaccgtgccatcaacagtgaggcgttcccaagcgctgtggagctttacgacccgcagctgatgacaggccgtgggcgcggcaggtatacctaccgcagtgagccgcgcgcggctgcggagctgatgctgcgtgaacagataaaggaaaagcttccccaggcccagattctttatgtctgctaaccaattcggacatcctgcccgccgtctctttcttgtgttcctgggctaaaacggtataaatacagaaaaaataaaagcgtacggattttagcccgtacgctttttatatgaatttattacggcagggcattgcccgctgcgcggtaaatttcgtaccattgttccctggtgagcgtgatatcggcacccttgcagatatcggtaaaacggtttgcatttgttgtgcctgtgacaacctgcatgttcgccgggtggcggagtatccacgcgacagcgaccgcgctgtctgtaacgccgtattccgacgctatccggctgatacagtcgtttaattccgggaatttgtcatggtttaagaagacgccctcaaaaaatccatactgaaacggcgaccacgcctgtatggtgatatcgtttaaacggcagtattccagaactgagccgtcgtgcatgatggacgggggattctgcatattgacgttgaagccgctgtcaatcatgcctgtgaccttaacgctcagctggagctggttgacaagcagcggctgctttacatattttttcagaagctctatctgcatggggttctggttgctcacaccaaagtggcgtaccttgccctcgctgtaaagcttgtcgaatgcttcggctacctcttcgggttccatcagcgtatccggcctatgcagtaaaaggatatccacataatcggtttgcagccgcttgaggctgccctccaccgattcgattatatgctcttttgaaaagtcataatagccgccgcgaatcccgcattttgtttgaaggatgattttctcacgcgcttccgggtgcagcctgagcgccttgccgaatacctcttccgatagcccgccgccgtatatgtcggcatggtcgaagaagtttacgttgcacagggcagctgtgaagataagctgctcaacctccttgacgggcattttatcgatgcgcatacagcccatcacgacggacgagcattcaagcaggccgccgaccttaatatttttcatggaatcgcctccgattttattttgtgttaatgttgataaattcagccttgagcttagaatacatgattttctggctgctgtaaaggccatagtagccagacagcatgtagctgacggcgcaagcgaccgcaaagagcaccataccctgtgcgccgaacagctcgatgctcaggataaacgaggcaatcgggcagttgaccacgccgcagaacaaagcgaccaggccgaccgccgcggcaaagccggaatcaagccccagcaggccgcccgcaacgcagccgaacgttgagccgataaagagcgtgggaacaatttcgccgcccttaaagcccgcgccaatggtaacggcggtaaaaacgattttcaggaggaacgcctcggggcgcgcggcgccatccagtatggctccatcaattacgctgatgccgataccgttatagtcgcgcgtaccgacgagcagtgttaacaatataatggccgcgccgcctgcgatgatacgcaggtattggtttttgaaaaatttttttaaaaatttttccgtccctttcatggccaggcagaataaaatagatacgaccgcgcaaagcgcggcaaggcccgccacgcgcaggatgttttcaaccgaaaggccgggaacggtttttaaattgaaccggatgggggaaataccgaacaggatggaaacgccgtacgccgtcagggaagaaacaatgcacggcacgatgccggaatagtagattacgccgacgctgatgacctccatggcaaacagcgtcgctgtaagcggggtgccgaagagggaagcgaatacgccgctcataccgcacataataaccaggtgcatatccttctcgtcaagatgaaggattttgccgacctgcgagccgatgctcccgcccagttggagcgccgcgccttcgcgcccggcggagccgccgaacagatgtgtaatgacagtgctgataaaaatcagcggggcaagcaaaagcggtacgcctttgtcggagcggatggaatcaataacatggtttgtaccggtttcatccggtattttgctgatttgatagagcagcacaataaccactcctccaacggggagcagatacagcagccagctgttccgtgtattcaggccggtcacaagctcaacgcttttatcaaaggcagagccgatgagcccgcccacagcgcctgtaaggaacgcaatcagtacccatttgcaaaaggtgacgacgtagccgcaggcagaggtcgcttttcttataaaatgtattttaagctttgttttattcaaaaaaatcaccgcattaaccgcataaaataaaaaacagtaagataatattattttatcacgaatataggaggtgtcaatttccacatctttataattgaaagattttcacactcatggtaagataaatatattaaaaagcggaggccttctatgaaaaacaagacgcgcatccttttttcgcttacgctcgccgtgctgacggcggtcaccgcaatatgtccgggcagcgcggctgctccagcggaaaacacgcagctgtccggctacagcggcacgcttgcttcagcccgcacaagaaaagatattgtggaaaaatggcttgcttacgataaagcagatgctgttaaaatatttgatgaaaatccgtatgtaaatgcgccgtatcggacaggaaagctgaatgccggattccttaatcaggctgagctgtattttaattacctgaggtacgccgcgggtttgccggatgtcgcgctcagcgatacgcttactgacaaagcacagcacggggcggtcctgctcgcggcaaacggcgagctgacccacacgccgtcaaagcctgccgatatgagcgatgctttttaccagcttggcgcttcgagcacagcgacgagtaatatttccatgcgctatatattcgacagccggaaaattttgaccagctcccttcagggttgtattgatgacagcaacagtaaggaaaatatgctggtggtcgggcacaggcagtggatgctcaacccaaagcttttatacacaggatttggttatgcgcgcaatgcggagggctacgacttcgctgtgacgcaaattacggataaaagcgcggcggacgccgactattcctttatttcctggcccgcgcagggggagtttccgaacaatatcattacttccggcacaccatggtcggttacgctcaatcctcagaaatttcaaaaccctgagcttgaaaaaattacggtaaaggtaacgcgtttatcggacggtatggtttggaacctgaccaatcaagaccatacggaccgtcccgacaggcaggagccgtatctcaacgtgacacagcgtgggctgggcgcaggcaactgtatcgttttccatctgggtacggaaagctttcaaacggatacgtacagcgataattttaccgtagagataacggggttaaaaacaaaaaacggttcggatgcgtcactttcctacgcaacgcatatttttgattttcaaaaagcccttgccgcggtacaaaatggcggggagaagggcgacgtcaacggcgattgggcgattaacacggcggacgttttgctaatccaaaggtatttggccgaggcggtgacgctcaatgaaaaacagaaggagcttgctgacgtaaacggcgatgggacggtgtcggtagctgatgtgctgctgattcagcgctaccttgcgcatgctattgccgggtttgattaaatatcgatgcgtagatgcatataagaaaccgccgcgtactagtttagtttcagtacgcagcggttgttttttgtattctttaatcaatccggagcaaatcgcgtatgcattcgccggcaatcatcagcccgccgacggatgggacaaaagaaacgcttccaggcgtctgcctgcgtgcgccgcctgcgttatcttccttcgtctggaacaggggtttaatcggctcctcagtggaacagaggacttttaaatgtgtaatcccttccttgcgaagctctcttcgcatgacacgcgcaagcgggcatacagttgtttttgagaggtctgtgacagacagcttttccggatgcagcttattgcctgtgcccatactgctgatgatggggatatgaagccctacagctgtttttatcaggataagctttgaggaaaccgtatcgattgcgtctatgatataatcataggaagataaatcaaaatcccgcgcgttttccgctgtgtaaaagacggcgtgcgtttccacctgcgcgtgagggttgatggaaaggatgcgttctttcatggcatcaaccttatagcttccaaccgtctgctgtgtggcaataatctggcggttgatattgctctgcgcgaccgtgtcgctgtcaaacaggatgagcgtgccgacgccgcagcggcaaagcgactcgcatacaaaggaaccgaccccgccgacgccaaacacagcgacgcgcgcacggctgagcctgtctacgccttcttttcccaaaagcattgcagttcttgaaaaatcacacatgaaatcacctttccgctgtgttatacccgctgattctatcatgaacaggccttcttttcaacagtttttgcgacaatttaggcgggttttatgccataaaatagatttgacagcaaaatgggagtgtgttagaatggctaagcatagaagcggtgagaggaggtcccgaaatggcacaggaaagcttaaaaacaattgcgcaaaataaaaaggcacgccacgactattttattgaggaaagttttgaagccggaatagagctgagcgggactgaagtaaagtcactgcgtcagggcagagtgaacctgaaggacacgtggtgctcagtcgtggacggggaaattttcgtcaacggcatgcatatcagtccatatgagcaggggaacatctttaaccgcgacccatcgcgtgtgcgcaggcttttaatgcacaaaagggagattatgcgcctgtttgggcttgtaaagcaggacggctatgcgcttattcccgtatcgctgtattttaaaggctcccgcgttaagatgcaggttgggctgtgcaagggcaaaaagctctacgacaagcgcgcggatatggcacagaaggatgccaaacgccagatggagcgtgcaatgaaggagcagaaccggtaaacaatattttttatttggggatgtaaaggtttcgacggggaccacaagccctggtaagcgagcagcggtgcggaaccgctataaaatccgcaaatttaaaaattaaacaacaacaataaagttgcttacgcagctgcttaattagcagctgccgttcttgccggaagtaccgcggtccggataagagcgtcgattagcggtgcacgtgaaccggagagtgccttgtatccggtcatgaatttaaggttaccgattcactgagcctgctgcagggcgctgtgaaaagggaattataatacagcagctacgctcgtagaaagccacggtaaatgattctcggacaggggttcgattcccctcatctccaccagaataaagcacccccgccgggagacggcgggggtgctttatagatggacattacacgaacacctactattttaaaggcggctttgccgtactggtgtggctgtaaggtcaaatagaaaagagcggtgaaggttgcttgttcaagctttgataaaaaacatgccctgccataatggcagggcatgttttttatataccgtaatgaccaatgcggagcagtaggtgcgcttgatataaaaataatcaaagaagaaataaatcatttgctgtttcataaaacgtacagtaagtcaaaagtcattgacaatatagaacaaacgttctaaaatgtttttaaacttcctgcagaaatattccttaaataagcgcgcgctattataaaagctgttggatttatggggatttctgtatgaaaagtttatcctttgacagatagctctcaagaggggggggaagttaaaaggatggttagggctaacagcaatggaattatgtgtggagggattataatgacggcaaaagagttatctcaatacaaaagcgcaaaagcagaattaaccggaatacggagggaaatgcaaaatatgccggatcagatagaggtcatggatacagttacctcctcatcctcggaatatccttatacggaacatttgcttacggtgcgcgggacaatggcaaaccttgaaaaggagcggctaaaaaaacgcgccgagcgtttggaaaaactcgtttctgatgtcgagctttttttggacaagattgaggatgcaaatattctccgtgtaatgaagctgcattatgttgaagggtttcaatggggagaagtcgcgatggagatgggcatcagccgttctggagaatcttacagaaaaaaagccgaacgatttttaaaaaaattttctgatgcgtcctgaatgtcctgcatgtcctttttagacctgctagaattataatcagagatcgtacagaaaagcttctggactttgcggtaaccgcaaagctgatacacttaatttatttacacacgaaggtacggcagcccactcagaatgatcccgcattctgaaggcggaaagtaccaagcgcgcaactgaaagacggctttaaatagcggcgggacgtctaagcagagcgcgaataaataaagtgttttctctttttgttaagatctctaaaataaaggctgcaattcctgcgattggtcttactcttaaacaattgtgtgcacccttttggagcactcgccaatttagcgtaaacacaagcttagctttttataacgctgtatcaggaggcggcttttattacggacaggcaaaagcaaggggatttatgtcggatttcgatggaagtattcagttgatcagccttttctgaaagcctgttaagaatctgccgcaaaattaggtgtgctcatatttgaatgatttgcggcagcaaagcaggactgtggcaacgctcaaacacaattcaacagttattagttgatggttgatacctggttgacttacgtcaaaatctaccgtaccgaatacgccgtggctatcagcgggatttacggctggcgaaatttctgtaacatcattgccggcacttcgacgaaccttgctgtcgggcgtataaacagttctcggaggtggaaaatcattgctcagcgctttaaagacatatctggaatcgcggggatatgagaacgtatcctacgaactgatgccggatatatcacagcgggtgcaggctgtcaatctcgtaaaattggaccatattgtcgatgagattaatgacgggacaggcacccaatttatccaggttcaatgccgcgatattagctatgaagaggcttacaacgcatgtaagggaatttttacactgcttgacagcggcatgaatgaaggtattgtccaactgacggacaaggttttttgtattgcacgcccgcagcgcggtcctttacttttggaacgcggggacggatttgttacgatttactgcgaaattgccctttggggcaaaaattgaaaggagattttaaatatgggaaagaaatatctgagaggttttgcaaactgtggctatgcacaggtagaggaagatacggtaacagcatataaggtaggcgaggtcacaaagcttgccggcgccaagagctgcgctccgaccgacaacaagacggagtatacgatttatgcggacgacgaaatctatgataacggctccgagtggaaggactctacgcttgtgattacccttcaggaggctgacgcaaaggacatcgcgtctcttactggagcggccttcgacgaatcgaccggtgagcttaaagaaggctcgcgcgacaacgcgccccttgttgcgttcacattttctgcgctgagaagcgacttcggataccgtatgttccgttatccttcctgccgctgcacaggctataagattacccacaatacaaagggtgaaacgacagaggcacaggcttatgagctgaccttcaaatgctccccgcgtaaaattgaccatattatcagagaaacaaaggatgtcgagcagggcacgccgctgacctggattgagacgattccttctttgcctgaaacacccgcggagggttaatcaatgtttggaagagataaaagcgtcaaaatgagcgcgccgaaaagctacattttatacggcgtgaaaatccgcaaactgccggttggaaaatatgtgcaggtaatggaagcggtcaataatcttcccgccatactgctggacgatatttttcctgatacgtctgactttggtacgcttatcgcacagctgaacgtaatgaaacgcgatgagttccttgatatctttggcaaaattttaagcgttgcgccaaagcggttttgtatgcttttatccgatttgctggaaattcctcaggaatggctgcttgacccggaatgtgagaatgcgctgagcctcaaggaattggcggaagtcgttcaggcatttgttgaactcaacgatttaacggattttttcgtaatcgtgcgctcgatcaaacagaggttgagcgcacggacgaatactggctccagcgctggttagcggttgctcaaagcataggtataagcaaacaggagctttttgagcagtattgttatgatgagtttattgctatgatggacgcctacaatgagatgcacagcatcgattccgacaatgccagggatgaggaagtttacgcggacgagctttaaacgcagcgcctgatattaaggctgtgatataatttctgcggagcaattccgtgtatatatttaatgcacgcattaaaaattgccttattcgccttattagtgattgtagtcaaattttatttataccattgggtttttgaatatatacgcttgtttttaatattgaattatggtaaaattttgctgaggtgaatgcggtatgatttgtaaaaaatgcggtgctcaaattgaggacaacagcgtattctgtaaggaatgtggggaacggttggaagaacagcagaaagaaccgatgcctaaaaagaaaaagcgtatcattataatttcggctgcggcggcagttctgattatcgcggggattgtattcggcgtgctgtatacaaattacgtgaaggaacaggaaaaagaagttttttcggaggtcgctctctatgagcaggaaggagaaaattactttcttttaacaacggaggcttttgcggaaaaattcaattatttcagcgacggaattaagctgggggaagcggataccggcactgttgatgaggatatctatttgcggacatgggatatcaataaagaattatatattacgctttcgtttaatagtcatatagatttaatggatgctgcggctataagttgctatggtgacgatgtttatcggaaaaacctcccaacaattctgcgcgttttctgccccggaatttcaaatgatgagataaataaatgcttggaaagggcggataaaaccaaagtcgacaagtatgatttttataattatgaagatatttcggttattatccaacgttataaaagtcatgtttttataactgtccttccacgaaaataacaactgttgtttgaaaaaagcacctgcccgaaaggcaggtgcttttgttatgcaatttttttaagaaagggatgataaatttgccggaagaacgtaatactggcaggctggtcgctgagcttgtgctcgataccagcaaggcgcggaaagaagcggaagctgtcaaaaaaatacttgattctgataatataggtgccggaatcgatatttttactaccgcgctgaggacatttgaccaggtttctcccgatgtgattggtaacatatcggatatcatcacacagattgaggcagtcaaacaagcatttcaaagcggcgcgaatcccgcgctgatgtggggcaacgtcatcgcggcgggagcaggcgctgcatttacgctcattttttctttgatagagcaaatgaagcaaaagcaggaggaagcgcgccaaaaggctatacagctcacagaagagtatgatcacaccagagaatctttacaggaacttacccgtgaatacacaagcctgaagcaaacgcttgattcaggaggactttcttatgacgaggaaatcgaagcaaagaaggaacttcttgcaatacaggaaaaattagtcgagatgtttggaagtgaggcaaacggattagatcttgtaaatggcaagcttgaagatcagacagatcaaattgaaaaattatcagtagcgcaggcgaaaaaatatctacaagatacttttaagtccggtcaagatgcggaaaaagtacttaatgaagaggtgtcgtatcatttaggttctttgcaggttactccctatatgactgactttgagaaaaatttagatagaatcatgaaatctgtttctacagatttctatgacataaatataggcgacaaggataccttttccagagagttccagttaagaattaatgctggtgatgcggaagatgtacttagaagagcatttgaattggttaaacaagaaagagataatgctaagagcaacggtgcatctgatagtgaaatcaaaaaatatgatgatatattatttgaaattttaaacaaaatccaagaagcaacttcagacgaaattctagaaagtaaaaggattcagaataaaatagaatattctgaagaagttgttgcaaccagcggcaatgatgcatttctcagaaatatggaaaaccagtataacttggtacacaataatattggtgcgatgcaggaacttgcctccgcatacgaaacactttcaagcggacaaaagttgagtacggattcccttatcgacctatgcgacagatacccagagcttaccgcttatattgaagaaacgggagacgtcagcttccaaaacggtgaaataattgctaatcttcaccaaaaacagagagacgctgtaatcagagacctggagcagcagaaggcggcgcttgaggaaaaagaaactctgacggatgaagagattacgctgctgaaaaacgtggaggaaacgctgattgcttataaagcaagtgccgcggacttacaaacgctcgacctctccgcggtaagcagcgagctgtcaaatctcggcagcgtgtatgcaaccctgcatgatggacaggaactcgacctgaacaccgtgctgcaaatgatagatacctatccggaatttgctcaggcaatagcggacgggtcgctttgcttatcggaccaggaagctgtcgtaaggtccctgtttgaaaccaaaaagaacgcggcgctgcagagccttgaattagatcgccaagatgtgatttccaagcgtaatgcgacaatggaaactatccaattgctgcagaagcagctggaagcgtataaggcactttatggcgggggagcgtttggcgacatttatgggccattgggagaggcacagcagaaatttgaggaaagctcggaaaagcttaacaaaatcaatgcgcagattgctgccataaagggccttagcatcgatgattatgcgtcttcttccggcggtgcaagagaaacggcgtcagccccggcccgcaacgaagcgctgcagcaggagcttcagcttcttgaacacagaaagtccctgaaccaggtttccgcacaggaagaggtcgcatggcttgaacgcatcaattccacgtactcgaaaaattccgatgaacagatggacatggaaaaacgcctgtacaacgcgcgcaaagcgcagcaggaggcggaagaaagggcggctaaggaagcgcttgacgccgcaatcaaggggattgaaaacaaaaaagcgcttggtaagcttacgaccgaggaagaaatcaatcagctgcagcgcatccggcagacctaccggatgaacgctgaagacgcgatgagccttgaaatcaagctgtataacctgaaaaagaacctgcagaacgagcagaccgacaagcttgacaatattgcggacggtgtaatcaaggcgctggaaaacaagtacgagaggcaaaaggagtctgagacaaagcggattaaccagtcgatagacagctggaaaaaatgggagaacgaaactgtaacagccatccaggggcagattgacgcgctcgacgagctatccaaggcgcaggaaagtgaggaacagcgccaggaatatgaacagaaaaggcaagctgccgccctgcagctcgcttatgaaaaggacgactacaaccgcaagcagctccaaaaggagttaaaccgcctcgacaaggaagaagcaaagcggttggaagcagaggcgcgcgagaagcagaaggaagagcttcagaagcagatggacaaggtcaaggaggaatccgagaaacagcaggagatgctcaaaaagcggcaggaggccctgaataagcagtatgaaaagcttacttcctcatttgcactcgagcaggaagcgcagaagattatcatgcagcaaggcatgaatggcgtaattaacctgattaattcgtatgctccggaattcaatctcgccggaaagtcgctcgctgataagctgtttgagggttttaggagccacaattgggatatcgacgcatatgccgactatattcaaaaaggagtcagcgccgcatatgcaaaggctgccggcaccgcggcaaaggcagcggaggagttttggaagtcacgtatagaatatgaccgccaaacagggatgacgacagcgccggtaaaagcgccgaaaataaatctgacggtcaatttcaaccagccggtggaaagcccggttgagacccagcgcaggctgcagaatgtggcgcaggagcttgcccgccaaattataaaatgaaagaaggaataagatgcaggaattgatttatgtgccgcccggcggctctattgtggatttatcgcgctgcgcggaatttaaatttcaggagccatatttgctttctgagatttccggtataagcgggatggattactcgatggttacaagcgaggccgctggtatagacggcgtaatcgtacatgggcttcatgttccaagcagggaaatcccctgtacggtatatgtcaagggcgatacacggcaaaaaatgtatcaaaacaggttcgatttgatttcaaagctcgccccacagcaagagccgggagagctgcgataccgaaacgactatatttctgtgaaaatcaaagcatacccgaccttgccggcgaattttacggaacgaatcaacagctataacaaatgcagcgttacctttaatgcgccggaaccgtattgggaagcattagaaactgaaaatgtgggtattgcatatcaggagaacattggctttaaattcccgctgtgctttaacccgtcgattaccttcggtatgcagaacaacactgttgaaatcttgtaccagggttcggttcccgcaccagtgcgtattaccataacgggggaagcgccctcaccgcagattacgaacgaaacgacgggcgaaaccatttatgtagagaacctgtctttagaagcagacgagagcgtaacaatttggacgaagaaaggcgagaagagcgtcaagctccggcgcgatagcgagattacagacgcgttccatcttgtgggcgtacgctctaagttctggtcgttacagccgggcaagaacgtcatcacctacaaatccgccgatgattccaagcacgcgcgtgtgaacatcgaatggacaaatctttatgcgggggtgtaattatggattggccggtcattaaaataatggcgccagacaagacttttttaggggaaatagacctgtatacctccctgcgcttcaaacgttcatggcagggcataggcgattttgagatacacatcgctgcacaggaatataatccctccctgtttgccgccgataacctcataatgcttgacggggatattcaccgcgccggcatcatacgcaagatggatacggctgtaagcagcgcgggattggaaattgtcatacaggggcagcatctcgacggtcttttgagccagcgtatcgtgattccctatgagggagaagcgaacggcggctatttctgtgtgccgaagaaagcatcggtttcaagcgttgttaaaccagtccctgcggaaaccatcctaaaaacgtttgtccgggagcaaatcccatatgcaacgagcggaagcggtatcaatccgcgcgggatgtacctcgatatggagtcggatatgggccgcgggatgaagacggtgtggatgagccgatatgacccgctcgatgaggtgctgcaaagcgtctgcgagtatacggacatggggtacgggattgcgatgtgttttgaagaatacggttcggcctattatgtgtttgacgtcatagagggcgttgaccggacagaagggcaaaatgaaaactcacgcgtcattatgtctttggaatttgagagcatcgccgatattcaatatacgatggatactacgtcctaccgcaacgtggcctacgccggcggcgcgggtgaagactataaccgtacagttctggcggttacgaatgagaaggcaatgccgagcggctaccaaaggaaggagacctttgtagactgcggttctctcgacataactgagaccgacacggcgctgtcccttacggaagagggcaagcacatgcttgaggaatacaaaagggcggaaagcatgaccgcaagcatatcttccgccagcccttttaaataccgcgagcattatgatttgggcgaccttgtgacaatttatgtcccagagcttggaattgcccaggatatgcgcgtaacagaggcagaggaatgctttgaaccgaacggcatatccttaaatattacattcggtacggcacagccgcatatcggacgggcgatccgcgcgctgcagccaaaaatcagataggaggaatttaaatatggcagaaaaatcaagattttttgacagtatcgacggcgacgaaagggtgtacagcgcggatgaattcgcagaggtactccgcacttttttttctacgggtattattaaaaatgaaaaaacaaattctacggcagaagactcgctgaaggttacaaaaggcacaacggggacgatggtggtcgcagcgggttacgcgataatcgatgggtattggtaccacaacgacagcagcctaaccgtaaatatcccagtttcgccggcagtaccccgaaaggatttaattgttttgcggcgcgataccgtgaataagaaaattgccgttacatacctgatgggctcagctaattcagaacctacgcccaaaagcaatgacataacgcttgcgtacgtgtatgttgccccaggcggaaaccaggtcattgaatattcagacaagcgcacaaagtactgtcaggcgctatatacgttaaatttgagtgaatttattacggaatttaataagacgctagatggttttaaagcggacgcccgagttgctctcggaagctttggcgcggatgaagcggcgcatttaacagaccatctggaagatgaaccattggcatcgcgtatatttcaaattatgctcgataaagatggtgctggctcaaagcttgactcggacctgctcgacggaaaacagggctcgtattatctcgattacagcaacctgacgaacaagccgtccgtccaccagatactcagcggtacgtcggcgcccgccgcgtccctcggcagcaacggcgacatctacgtaatgtacgaggggtgagcatatggctgatattcaaagcacctacagtatgtcgaccacaccggtcatcaagcataccgtttcgtatgaaaccaagcggtccggaagcacggtgtactaccgttttaaaatttcaacggcgccaattagcggcggctcttattttggctataacctcgtctgctctgttacactgaacggtaaatcggttgcaactgacgcggagctgaagcccgcttcgccgagcacttggacctcggcgcgcgtgaaatacctgccgtcgagcacgggctggtattcggtggcgggtgttacctccgccgctacgctgcccgcaaaaattacctttgcgagcacgcagacgtccggctccgcgtcaagcgggagctgtactgtcgatgtccccgcgggttccgccccggcggcgccggtgattgagctttcaaatacggccgcgctgccagaggcggcggtcaagattggcgtgtccggcggctcatggggagacagcggggccggcaaatataactaccagtacagcacggataacagtaaatggacaacgttttataccggcacggcaaagtcgcagagctttctgccctcctcttacgggggaaaggcgggaagcgccttttatttccgggtccaggcggtaaacgcgcgcgggttgtcggtatataccaaaacggcgaccctgcgcgttttatcgccgccgccggctgaaacgggaaaggcgcgcgtcaaggtaaacggcgcgtggaagcaggggacggcatatgtcaaagtaaacggtacctggaaaaaagcgaaaaaagtatgcgtcaagacaaacggcgcatggaaggatggtgtataaatggaagcgagaatgatagaaatggccgtgtcaccagatgaaagcgggaataagctgacggcacaacaggccacgcttggctatgccggagagcatctggcgacgcagcttcaatttaaatttccaaaaacatggtcggaaaacgatagcctgaggttctatgtaagcctcctggcggcaaatggtaaggcatataagacagagcttcaggaatggccggtaactgtcctgctgcccgcggcagtcacgtatgaagggagcttatatatccaggtcgttgcggttcctgtagacgatgaagcgcttgaggtaaagaaatcctcctgctttaaagggacgattgaaaagagcctcggcggggttcagagccttcctgaggatgcggcggctggccttttggagcagagcctcaaggacttttatgccgcgatgcagaaactcgacgaaaccgcaaaatcactgccgtatattggagataacggcaattggtacgtatataatccggatttgaacacgtatgaggacacacaaaaatcagccttaccggaaagctttgctacccttgaccagcagtacgcgggtacagccgtcatatccacagtaaacaccttcaagatggatgagaaacaggttctaccgggctcgaaggtaatcctgaccatgacagacggctcaaatgctgcgagatttatcaggacagacggcaatcccctttattactacgggacagacaaggttgtggaggcgctgggattcgatgtgcctatcgaggttgccgctgaagatttgattgccggtattagggtttacagcggcggggcgtatacaatcaagtaccagaccgcgccgtcgaaggtgtttttcgattatgctgacggcgctgcagaaaacgctgcggacgctgccgcggaaatagcgaggcgtgagctggcagagcaatatgggccgtactggaacaaccaggtggccgggaaggcaagcggggcaactgcggaaatttccggtgctgctgcgggtacagtgattaaaagcctgattatatcaggcggtacatctgttggggccggtgctgcagagggccaagcggacgcataccctgccgcgccctcgaaggtatatatgtgcgggacaaacctgttgaaattaaaacaggacacacgcacggcaggcgggctaaccatgtcctgtgatggagatttgatagcaattggcggtaaatgtacaggaacaaacctttatgtccttgaaaagcttacgcggttcgatgttccgtttactctccacgttcaggtgcttaccggaagtgctaccggtgctggaatgtattttacatctaatgcattagttgggtttaaaacgcagacaaggtatttcccaaatggaattacaaactggaaaggctccccccgatggattacagacagcaccgtattcaccgacgactttacctgccgtatttgggcgacgccgggcaatacgccggatatgccgtatgagccataccgtgagcaggaaatattgctgcctgagggcctttccctctatggtacgccggatggcttccgggatacctatgacgtcgtttcgggtttgctcacaagccgctgcacgaagctcctgcttgccagcggatggtttttttcctacagcacagagggtgagacagtcacgtggattacaaatcagtattatacggaaagaaagcagtattaccttgtgcatgacggtaccgtaacgacgcacacgaccgattggcagggtaaaatcagtatgactgtcaataaatctgacgttggaatcaacgcggaggacacgttggaaagcgctacgcgaaaggctagggaatattttgcaagctcatacgcaatcttaccgctgaagcagccggcaactgaacagcttatgcctgcttcggtgtgcctgccctcgggcaatgctacggtgctcgcggaccagggggacaccgaggctgtcttctgccgcgatataaacggggcttatctcgatttgctggagtataccacgtcgctggaagcacgcatcgcgcagcttgaaagcggcgtataaattggaaagaccctctcaaaaaacaaatgaaacccgcgcatagcggctgaaacgaagaaaggataatacccgatgacaaagaaaatctatttatcaccgagcaaccagaacgggaacaagtacgcggctggaaacacaaacgagatggaacagtgcaataagatagctgctgcggcggaaaccgccctgaaacggtgcgggttcagcgtgaagcgcgccacaaaagggcagaacatgagcgtaagcatcaacgaatcgaacgcatggggcgctgacctgcatgtacccattcatacaaacgcctgtaacggcaagattacaggcggtacgttaatcatggtctacagcaacagcggggagaacgcgaaagcggcaaaggcaatcaaggcggcgcttgacccgattacgcccggcccggattatgcggtgcaggccaattcaggacttgcggaactcagtcagacaaaagcaatcgctgtatactgcgagtgtgaattccacgacaccaaaaccggcgcggaatttatcatcaataacacaaccaaaatcggtgaggcaatcgtcaaaggcatatgcagctattacggggtgaagtacatagcagcttcaacaggtacggcggcaaaggcgaaatactatgtccagattggcgcgtatgccgaaaagaagaatgcagaggcacaggtgaaagcggcaaaagcaaagggatttgacgcgtttatcaaggagctgtaaggcggtgacgcggtgtcgaatgaaatcatcatagcgctgctgtcgcttgttggtactgtaatcggttcagggctgggcgtgattgcgtccagccgcctgacgaattaccgtatccagcagcttgaaaaaaaggtggaaaagcacaattccgtggtggagcgtatggctgtcgcggaaaaggaaatccgggtcgccaatcacaggatagaagatttggaaaggaagatggagcatgaatattaactggaaggtgaggcttaaaagcggcccatactgggcaggcttgatttcgcttgtactgactttgatttacacgttactcaacatggcgggtatcgtaccgcagtttgagcagaagcaggtgatggacattgttgttatgctgcttcagattctcgcgttcatcggcgttgtgagcgacccgacgacaaaggggttaagcgacagcgctcaggcgatgcggtataaggagccaaaatagaaagtaagtctataatacaatgaaaatcccccggcctaaaaccgggggattttttgtttatatttacgatgtgccattaggaacggtgctgcgcatgaaaacaacgatatatgtattgccagccgatgctgtgacacgctgctgttgcaataaaagcccgcttaaagagcggttcactattgccgtgttttattcagactgacgttttcctggtaaaactatttaatatcttcagaagaaaacgcgaatgaaaattttgtgctgccggttaaggcgccatccttataagtgaattcgaattctttccaatctttgtttacttcataggcgacataaccagagagcttctttcccggtgccaaatctccagaaaacatgtcttcatcctccggatttacaagcaaagctgtagactttatgcttttgtcatcagcataagcctcataataaaacatattgacgtattggtcttcatccgacttattttcagcctctaaaaataaaacaaggtactttttaccgtctgccggcgtggccttcatatactcgttttgaacgatttcatcatacacctttgcgcttgtcagcgtaattttcaaagtatcagactgtacgtattctccaattgaagctgtttttgcagcttccgtcggcttttccgtagctggctcgctttggctttgggaactggcgcttcctatgacagtactgctgccaggcgctccacctgttgagcatgacgctgccgacaagagcatggccgcaaccattgccaccaataaaattttcttcataatgctatcctcctgtttgcgttctccgcaatatttgacaaaataccgcaaagcgtttataataatatctggaggatagacgattttttgtgtttatatccgggccgcttccgagtgcagtcggtggcggccgcttttatttatgataaagcgtttgttaaattgtaggccatttttaattataagtcaagacaatattataagtcaaagtaatattaacgcatgtgcttttaaacgatgattacacatatttttatcaataacaaggccgggacgatagatatattgttccggccttattttctttaaaaatccaatttatatttgttgccggacatcaaatgtcagggtttaccgttgcaaaacgcgacaatttagagtaatataaaaatataaacaatagttttagtaccaaaaaaaggagagcgtgggctcaccgtttattgtgaaggaatgtgccgatatgttttttaaaggtttccaggtggatccccgctatagggaacaggtcgagtttgccaggctgaagctgaatgtcccgcggcttttttatctttccctcttcactgccgtctgggagcttgtcatgattggcgccaacataattgcgggcgacttttatttacaggaaattaaggtttattatatgcttgcctatatcctatactgcctgtttaatctggtaacggcggctatttcctaccattaccgcaaaagctgtccgcaggattaccagtcaatcaagccgtttcgtatggttttaattgcttatgtgaccgtctcgctggtttggggactgtatatcatctatttggatcagcagatgtataagcaggtaattgcgtatcttgttccgttgattgttatcgcaagtatactggaggtccggccaaagctgttctccgttatgaatatctgctcgctggccgcgctgctggcaattctgtatgccacgcgcaacaatttatcaatctttctcggaaatcttgccaatcttgtaatcctggtatcctttattattgtaagcagttttttaaaataccgcactttttgcgaaaatgaaatcagtaaaattgagattaggcagatgtcttatgaggatgcgctgacagggcttcaaaacaggaggagcctgcaaagttatttggaaaacaattatatgaatccggaaaaaacagcgggacaactaggcgttatgatgcttgatatcgattactttaagaattacaacgattcctacggacatgtcaagggtgattgggtattggcccgtatcggcgagctattgacatgcgcggggaaaaaatatgacgtcgccccattccggtatggtggagaggaatttattattttcgcggatggtaaaccgcttgaacaaacaaaagaaatcgccaatgacatcgcccggatgctgcgggaactgaaaattgagttcagcggcggcattgaaggtatcgttaccgcttcaatcggcgtgtgctatacggactttgccggcggcgacgcgcgcggtatataccagtatatcaacgcatcggacgacgccctttattccgccaaggaaaacggccgcaaccgggtggtggtaaaaacgatggcgtccgttatggacgaggccgtgcagacgaaagcgtaatagaaagataaaccacatctgctaactgaataccatcttcatacattggatagtcataattatccgtgaaaaagcccttggttttatgagaaatccgaaaaccgtttttcagataaaactgtataatccatgagatgtcgcctgttcctacaggcattgtcttatatatgcgcctgtaatgtgaacatatgcggtttaaaagcagctccatgaaattcattttgccgctgtctgcaatttgagtatcctccaagctttatttgttttatgaaatcacgattatttttattgattagagcatggatttatatagcgttagtttgcccgtccggaatttcctgacgggctttttgtattcatcgcaggctgtccgcggcgagctttttaagcttatccgctgcaagcagtttaaccgtaccgcgcgatagggaaacaagcccttccgactggaagtacttgagcatccgcgtaatgacctctcgcgcgctgccgagctggcgcgcgatatcttcatgcgtaagctttagctcacctgaagcctgcagggcgccttcttctgttaaaaacgccgcaagcctgcggtcgaggctcttgttcataacctggtcgagcagccacattacatcggaaaagcgcgatgccatcagctcgttcgtgtatttagcgacgggaagcgacgtgtccatcagctcttggtatacgcgcgacgggataacgagcaggcgcgtgtcctcccatgcctcaacaagcagctcgaactggatgctgctcataatacaggaggctgaaaacaggcagatatccagttcaaacagccggtagagagtgacttccctgccttcatcggaaacggtaaatacacggagctgcccgtcaagcacgagaagcaggcccacgcagtcgtcggagccgttatgtatgacggttcctttttttaaggtgcgttctgcgcaggaggacttcagcagcatttgctggcggctgctgagctggctccaaaacgggaaaaggttgccaaacggtatcatcgcttgttcactcctaacggcctggatgccgcaacgttgtatgtacatgctgttcgggtatatctgcacatattatataacaggttccatggtgttttcaatcgaaaggcgggaaatgtgacgtggttacagaagttttggtggaaaccgcatattctattggtaaagacaaagcaagggggactttattatgaatacaatatccattacaaacaaaaatttccacaaagaagtgctttccgtagacgaaccggtgctcgtagacttttgggcaccgtggtgcgggccgtgcaagatgttctcacctgtactcgaaaaggtcgcggaggaaaaccgcggggaggtaaaggtcgcgaaaatcaatattgacgaggaaccggagcttgctgagagatataatattatgagtattccgacgctgctcttattcaaaagaggcgaagtcgtgtcccaatccacagggctcaagccccagcaccaggtggaggcaatgttcaaatgagttttttgggaatgttaaaagggcgcgcggagcatctggatatcaatgaaatggctgtgaaggcgcgcaaagagaacggtgcggtgctgctcgatgtacgcaccagggaggaatacaaaagcgggcatattggtggaagcgtcaatttgccgcttgacaatatcgaatctgcgcatactattatcgataagaaggatgcgccagtctatgtatactgccacagcggggcaaggagcagccgcgcctgcgcgcggctgctcacaatggggtataaagcggctgtgaatatcggcggaatctgctcatggcgcggtgaaattgaaacagggggagaataacatgaaggttgtcattatcgggggagtagcgggcggcgctacagccgccgcgcggctgcgcaggctggacgaacaggcggaaatcattatattggagcgcagcgggtacgtttcctatgcaaattgcgggctgccctattatatcggcggggaaatcaccgacgaaaagcagctgaccctacagacgccgcaaagctttttcgcgcgtttccgaattgacgtacgcgttaaaaacgaagccctttcaattgacagggaaaagaaaacggtgacggttaagaaccttgcggatgaaagcgtttatgaagaagcgtatgacaagctggtactctccccgggcgcaaacgctgtgaagcctaatattccaggaatcggcagcggccgcgtttttacgctgcgcacggtagaggacaccatgcgcatcaaagcatatacggaaaacgaaaagcctgaaagcgccgttattgtaggaggaggctttgtcgggctggaaatggcggaaaacctgactagcctcggcgtgaagacgacagtggtagagaaggaccggcaggtcatggggcagctcgattacgatatggcgtgcagcgtacacgcgtacctgaagaaaaagcaggtgaacctctgccttaacacaggtgtttcctcccttgaagaaacggacggcggcctgctcgttacactcgataacggggaagtgctcgcggcctccatggcggttatttcaattggcgtcgtacccgatacgcacctcgcgggggaggcgggacttaagctgggcgtaaagggttcgattgctgtaaacagccgaatgcagacgtccgaccctgatatttatgccgtaggagacgcggttgaaaccaaccattttattacaggagaaaaggcgcttgttccgcttgcggggcctgctaacaagcaagggaggattgccgctgacaatatatgcggcagggaaagctattatcacggcgcgcagggctcctctgtcctgaagctgttcgacatgacagccgccgccacggggctcagtgaaaaagcagcggcagccgcggggctttcctatgacaaggtggttaccttttccgcctcgcacgcggcttactaccccggcgcgtccaatatgacgataaaaactgtatttgacaaggaatcgggtaaaattctcggtgcgcagattgtcgggttcgacggggtagataaacgaattgacgtaattgcagccgcaatccgcgcgggtatggcgggggaagaccttgaagagcttgagcttgcctacgcgcccccgttttcctcggcaaaagacccggtcaacatggcgggttatgtgattgaaaacgtgcgccatgggctggtcaggcagtaccactggcacgatgtgaaggatttgccgcgcgacggaagcgcgattctgctcgacacgcgcacgccgtctgaatatgaaaggaagcacatcgagggaacagtcaatatctcgctcgacgagctgcgagggcgaattggcgagcttgacaggtctaagcccgtttatgtcaactgcttcagcggactgcgcagctatattgcgtgccgcattctttcgggatatgggtttacctgctataatctgtcgggcggattccggttttacgatattgtaacgtctgacgagggcttcgattcccgtcccaaacacgcgtgcggagtggaaatcggcgcagcgggcgaataaggctttgagccgtcccgtttgtaagacaggcgtatagaaggcattttccgtccggtggattcacttccccggacggctgctgttttatgagataatgtgcaaaaatccggcggttggccggtgatttccgttccttgtatccatttacattttatgtgccctgtgctatgataattcaatacggaaccgcatatttgcagatgggaacggagcgtgacggtatggctggtttggttacatttgaagacgtttataaaagataccggatgggagaggtgacaatcaccgctgtcgacggtatctcttttcaaatagaagagggcgagtttgccgttgtggtcggctcaagcggagcgggcaaaacgacggtgctcaatattttaggcggaatggaccgatgcgacgcagggaaaatcattgtcggcgggaaggacatcagcacattcaagcaaaaggagcttgccgcataccgcaggtacgacatcggctttgttttccagttctataaccttgtgccaaacctgacggcaaaggaaaatgtagagcttgcaacccaaatttgcaagaacccgctcgacccggccacagcgcttgcgagcgtcgggcttgaggaacgcatggacaattttccgtcccagctttccggcggagaacagcagcgtgtatcgattgcaagggcgcttgcaaagcgcccgaagcttctgttatgcgacgagccgaccggcgcgctcgactacagcacgggcaaatcgattttaaagctgttacagacgacctgccggcgtgacggcatgacggtcgttttgattacgcataaccaggcgattacgccgatggccgaccatatcatccgcatgaaaagcggaaaggtcatcagcaacgtacataacggacagccgaaatcggttgatgaaatcgagtggtaagatgaaaagggaaacggtggaaagggggaagcccggtgacaaaagcactgcgtaaaaatacgctgcgtgagataaggagcacaaaagcgcgctttctctcaatcctggcaattatcgggctgggcgtcggcttttttgctggcgtcaaggctgcgagccccgccatgacaaagacctccgacgaatattatgttgaacagaatttaatggatttccgcctggtatccacggttgggttcgacgacggcgatttgaaggccgttgcggatatcgacggcgtgaagcaggtggcggcggcgtacagcgccgacattatcgtcaatacggacggcacgggcaacgtcgtgcggctttattccctgccgcagaaggacggggataaacagcccatcagcgagccggtgctcgtggatgggcgcctgccggagaaatcaggggaaatcgccgtggaaagccgttcctacgagggcgcttttaaaattggcgataccatccatattgaagcgaaaatcgacgacacagacacaaaggatatattgaagacgctcgactataaggtcgtgggccttgtgcagtcgccgatgtacatctcctttgagcgcggcacgacgaccatcgggaacggcaaggtgtcacagtatatgatgatacctccgcaggatttttcctatgaaaggtataccgatatttacgcgacgacaaaatatttgagcgccgatatttcttctttcagcgatacatacaaggacggcgtgaacgatatatcgaaaaagctcaaaagcttaagcggcgaacggctggaggtattcgaccaaagcacgctggagcaggcaaggcaggagcttgaaaacggcgttaaggaatatagcaaccagaaaaacaaggcggagaaagagctcaaaaaggcacaggaagcgcttgatgccgcacagagggaatacgacacccagattaaaaagggcaaagagaagctatcagacgcgcaaaagcagcttgaggaagggcaggcgctcctgccctctaaaatcacagaattttatgaggaaatcgcacaggcacaggagcagataagccgaaacgaagcaaagcttgataaggcggagctgcaatacgaggcgtcaaaaaaggaatacgatgaaaaaatagccgccgcggagaaggagcttgcagacggcgaggcggaatacaaaaagcagtatgaagaattttatacccatacaaaaccgcaggcagccgcaaagctggacgccttggaagacctgctccatgatgcccagcagacggtaaaaacgctggaggagcagctggcgggagcaacaggtgaagcggcccagaggcttaaggaagcgctttccaaggcgcaggggctgatttctgtctaccaggacgaaatcaaaagcggcaggcagcagctcatagacggcgaacagcagctcaaggacgcaaaaacgaaacttgaagacggcgcggcggagctcaaggagcaaaaagaatcaggcgcgaagcagtttgcgcaggcaaaggaagagattgacagcggcaaacaggagcttgaaaaagcgaaaggacagcttgcccaggctaaaaaagagggcaagcggcagcttgacgacgcgcaaaagcagctgattaccggaaaatatgaattagaagacggtaagtcagagcttgacaggcaggaaaaggaagggcaggagaagctcgacgagggaaagaaaacccttgcttcctccaaagaagaggcacaggagaagctgaagaatgcggagctggagcttcaactcgcgcagaagaggctcgattccttctccgaaatgaaatggtacatattcacgcgcgacgacaacccgggctattccaccttcatcgataacgcaaaccgtgtcgatgcggtggcacaggttttcccgctgttctttcttctcgtcgcggcgcttgtctgcctgaccaccatgacgcgcatggtcgaggaaaggcgtacggaaatcgggacgctcaaggcgctggggtattcctccggcagcatcatggcgaaatacctgatttacgcgacgattgcggggctttccggagcgcttgtggggcttgcgttcggcgtgccgatactgccgaatatcatattcaacgcctacgcgatgatgtattcaatcaaaccgcttacgtttgtgatgccgtggctttatatagtaatcggcatagcggcggcgcttgtctgtacgacgacggtcgcgtatatcacctgctataaagagcttaagggccgcccggcggggttgatgcgcccgaaagcgccgaagaagggcaagcgcatcattttagaacgcataccaatcctctggaagcacatgagctttacctccaaggtgacggcgcgcaacctgctgcggtataaggcgcgtttcctgatgacggtgctcggcgttgccgggtgtaccgcgctgattatcgcggggtttggcatcaaggattctatcagtgtgattgttgacaagcaattccaggagatttacaagtatgatacggtcatcgtcacaaaatcctcaaatgattttgagcaggcgaagccgctgttcaacgatgtaaatgccgacagccgcattgcgggggcggcgctggtggagcagaaggccgtaaaggcgttttctgataagagcagtgaaaaaatcgatgagatttatgtctttactccgcaggacaccggcgatatggagaacgtcatcgacctgcatgaaagggaatcgggcgcaaagcttacgctgtccgacgatggcgctgtcgtgacggaaaagctcgccaagacgctcaatatcggggtaggggataccatccgctttgaagacgacggagaggagtactcggtcccggtcacgggtatcagtgaaaattatttgtatggctatatttacctttctccgggaagctatgagaaggtatacggggaaagctccaaatataatatgattcttgccaaaaccagcagcggggaagaggacgaccagaagtcgtttgccaaggatatgctcgcacgtggcgacatagcggctgtttcgtctacaagcgacggaatcagcaattttgaggatatgatacagagcctcaacatggttgtgtatgtcctgattatctgcgcgggcgcgcttgcgttcgttgtgctttataacctgacgaatatcaacattgccgaacgcgtgcgcgaaatcgcgacgattaaggtgctcggcttctataataaagaggtaagcgcctatgtataccgcgagaatattgtcctgacgatagtgggtatccttctgggactggtaatgggcgtgttcctgactgactttattgtgcagacggttgagattgacaacatcatgttcggcagggggatgaacgccatgagctttttgtgggcaatcggcctgacagcgctgttctcgctgcttgtcaactggctgatgtattataagatgaaagcggtcagcatggtggagtcgctcaaatcgattgaataagcttaacctatctatttctatgaaaaagggaaaccgcctgagcggtttccctttttcgcgcctttcaggccggataaaacgaaaaggagcgcgtttaaacgcgctcctttatatgtagcctttatgaaaacagaagcaaattattcctcttcgttccaggaatacatctttctgagctccttgccgacagcctcgagctgatgctccgcttcaatgcggcggcaggagttgaagtgggaacggccatttttgttctcggcaatccacttggaagcgaaggtgccgtcctgaatctcggtaaggaccttcttcatttccttcttcgtctcgtccgtaaccagacgcttgccggtctcgtaatcgccgtactcggctgtgtcggagatggaatagcgcatcatgctgaagccgcccttgtaaatgaggtcaacaatcagcttcatctcgtggatacactcgaaatatgcgttctccggtgcgtagcccgcttcaacgagtgtttcaaagccggctttcatcagggcggttacgccgccgcacaggacagcctgttcgccaaagaggtcggtctcggtctcagccttgaaggtggtttcaagcacgccggccctgctgccgccgatacccgccgcgtacgcaaggccgaggtcctgcgccttgccggtggcgtcctggtataccgcaatcaggcacggtacgcccttgccctcaacatattcgctgcggaccgtgtggcccgggcccttcggggcaatcatgaacacgtcgacgtccttcggggggataatctgctggtaatggatattaaagccgtgcgcaaacgcgagcgccttgccctcggtgaggttcggggcaatatcgtttttataaagcccggcctgtttttcgtcgttgatgagaatcataataatatcggccgccttcgcagcttcagcggctgtcatgaccttaaggccagcggcctcggcctttgcccagctcttgctgccttcatataagccgacaatgacgtttacgccgctttcatgcaggttgagcgcgtgcgcgtgcccctggctgccgtaaccgataatcgcaacggtcttgtcgtttaaaagacttaggttgcagtccgactgataataaatttttgccattgtgaattcctccttgccattgtatatggcggtataaatttatatgaatctgttaaaccgtggttcagcgggcggtagccgcgcccttttcaatggcgacggtgcctgttcttacgatttcacggataccataaggcttgagtaaattgatgagcgtctcgattttttccaccgtgtcggaatactcgaacgtaacggtggtctgcgcgacgtccacgatttttgcgtccatcacctgtgcaatctgcatgatttcggaacgcttcgcggtgctgcaatgcaccttgatgagcgcgagctcacggcttaaataggtgccctcctcataggctttgaccttgataacgggaatcaccttgtttaattgcttttcgagctgctccaccacatattcgtcgccgtccgcaacgattgtgatgcgcgacacattcgggtcgttcgtcacgcctacggcgaggctgtcgatgttgaagccgcggcgggaaaacaggcccgatattttacttaagacacccgcgtggtcttccacgaggatggaaagcgtatgcttcataaaaacaaatcctttccgcggattttatgcgccgttcaaatagacggcgtgtctgggcttacgttgcagacgagcatataagcgccgctcgatttcagcatttcggccgcggccttctgcgcttcttcatttgagtttgcgaccgcggagggaatatggtaggcttccgcaatcttctggaaatcgggcgtttcctcatcgaggaacgtcgcgctgtagcgcgagccgtaaaggtttttctgcagctccctcaccatgccgaggcgcgtattgcgcataatgataatttttacgtttaaatggttctgcgcaatggttcccagttcgttcatgcccatctggaacgcgccgtcgccgcagaccacaacgacctccctgccagggcgcgcaagcttagcgccgactgcggcgggaatggaatagcccatcgtgcccatgccgcccgttgtgaggaaccggccctccttgatgcggaaattattcgcgcaccaaatttggttctgcccgacgtcggcgacgagaatcgccttgctgggaagcatggaggaaagggccgcgacaaagctccgcggctccacaaagccctcaaactgcgggggcgtacggtaaagctcctgtttccagcgggtgacggtgtcctcccataaatgggggatatggtagtcgcccacgccgtctgtgagcttgtcgataacgtttttcatatcgccgacaatcggcacggtcgtcctgatatttttgccgatttcggcggggtcgatgtcgatatgtatgatttttgagcgttcgctgacctggtcgggagcggcgacagcgcggtctcccaaacgcgcgccgcatacgatgatgaggtcggcctcatggatggcgcggtttgcggcgcccttgccgtggctgccgagcatgccaaggtactgctcgtggtcggaaggcataacgccgattcccatcatggtggacacgacgggaatgccggtcttttcagcaaacgcaacgagcttgagcttaatgccggaggacaatacgccgccgcccgcgcaaatgaccggatggctcgcgcttttaatcagctcgcacgcctttttaatctgaatggcgtggccgctcgtgttcggcttgtagccgatgatttccgctttttccggatagataaactcttctatttcattttgctgaatatcgattggaatatcgatgagtaccggccccggccttccggtcgtagcgatatggaacgcctctttgaatacgcggggcaaatcctccgttcgcttgaccaggtagctgtgcttgacaaacggctcgcatgcgccggtgatgtccgcctcctggaacacatcgcgccccagtaaatcgctgcgtacctggccggtaatcgcaatgacggggatggagtccgtgtaggcggtcgcaatgcccgtaatcaggttcgtcgcgcccgggcctgaggtcgcaacacatacgcccgccttgcccttgccgatggaacgcgcgtaaccgcttgcggcgtgcgccgcgttctgttcctgccggactagaatgtgcttgatatttgaatttaaaagggaatcgtaaaaagggcatatggcagcgccgggataaccgaagatgacggatacaccctcgttttccagacatttgaccatgatatccgcaccgcttatcataatgccggttcactcctgtcggttgctgtatttttaaacagttgcctgcggttatttcgcattcacgtttaaagataattataatatgattggggctttcggtcaagtattttagcgaaataaagtgtcaaagggcgggccggtacacagcgcgttccatataacaggctggatttaccagaagaaagcaaagaaagaagggaacgcccaacgttcccttgccagtaaaagagtatttattgggaggagctgccagatgagctggcagaggctgtttccgcctcggaggaagacgccccgctttgcgcctgcgtatcgtcttccgtataacgcgggtatacgccgccgttgaggtaaagcgtgccgtccgcaatcagccagtttgaggttgtaaccttttcttttgcgccagcccattcaaacgtctgggcatcgccgccattcggcgtcatggtgagcaccatatcgtccgaaacgctgtacgtccctgtcgtaccgccgattgcgcaggtgccgtcttctttaaaatcgcaccatacctggctgcggtattcccatgcgccgacaattgcctttgggtcgggcggtgtctgtgagcaggaggaaagaagcgccgcgcaaagaagcaggcacgttaaaaatacgggaaccgttttcttcattttgttcatcctttcgccgctgtttaggccgtctcatccttactttatccggattgcggccgattactaaaccaaattttaccgatttttacgggaaatgtcaacgcggttttataaacaatttgaagaattttgtacataacaggtgatgaaaacttttggataaaacgaatagagccgccgcgccatagcccgattctgtcagaatgggtaatacatgaaattgctgtttttctgaaagccatagcctgtgtacagcagcacgcctatgtcagacgcagttacctgtaccgcggcgcagccaaaattcttcgcttcgtttaccgccttatccagcagcatttttgctatcccatttctccggtattcttttatgacatacatgcttgatagcaggccgattttcccggacgggcagctgtaatagggcggcttttcaacaaaggacatcccgctcgttcctacaatccttcctccgtcggccgcaagccatgaaataaacgtgccgtcgtcaaaatgcctgctgtaataatccaggagattcggctttaaatcaaaagaaggcttcgccccttcctccatcagctgttgtattctcatttcagccaacgtatcaaaatccgtttttattgactttctatatgtaactgccataccatcttccccattctgcgtgactatttatatgtagcgctgtgccagaccggcttatgcttcttttatttgataaccagccccatcaggcgggaaagctcggcggcctggaacatggtgacgacagcgcccttgagctcggtgcattcaatcgacacgataagcccggacagttcgcaggtgcgcaggtcgattcccttaagcggcgttttaaaaaagctggtgcggacaaactggttattgtcaaagacggcgtttttcagcttgcactgggtaaacgtagcggaattgaaatcgctgtcacgcactataacgccctgcattttggattcatcaaaatttacaaagctcaggttgctgtcagaaatcgatacgtcgttcatccggcattcgcgcaggttcgcgccgacggccttacagctttttatttcacagcgggagaaatagctcccgttcaaaccggcgttagaaaaattacaggaggaaaacgaacagtcgtaaaaggaagccccttttaatgggcatcctgtgaaattacagccttcaaatatcacgtttttaaacgatacgccttccgcgccggtttcacaatatacggcttttttaacacgcgcgttatacaccgcgccgtcgaggatatgcgcttcctccagcagctcccggaggtttgaggtcgtgatagggttattaggcaggttgggcgcttgcagcttcatggcggtttcctccatttttagggattatccctatcttatatcattgcagctttccaggcaaggcatatataaaaaagattttccgccgtgtgaaaactgcccctgcgcaagaaacccgcaaaaagaaaggggaggggcaaaagcctctcccgcaggtccatattttttatttccaattgtttacggtgtcgctgtaaacgttgatataatcgtttgcactgcgcgcccagctgttgtcgcttaccatgcagcggcgcataagcttcttccagccgtcgcggttccagtagccgttgatggcgcgctttaaacactgcaccatatcatatgcctcatatttggagaacgtaaaaccattgcccttcccgtcaaggctgtcatggatggaatcgcgcaggccgccgacctcgcgcacgacgggaaccgtgccgtagcgcagggcaatcatctgtgacaggccgcacggctcgctcatggagggcatcaggaaaatgtcggagccggaatagatttttctcgcaagctccgggataaagccgatgcacgcgcataccctgcccgggtatttccactgcatatggcggaagaaatcctcatattccttgtcgccggagccaagaatgacaaactgtacgtcatggccgcacatgatttcgtcgagcgtcatacggacaaggtcaagccctttgtgctgtaccatgcgagataccattgagataatcgggatatcgccgcgctgcgcaaggcccaagcgctcctgaagcgcgcgcttgcattccgccttgccgctcatgtcgtccgcggtataattgcggtaaagctggtaatccgtcgccgggtcgtagcttgcgttgtcgattccgttgaggataccgcacagcttatactgccggttgcgcaggatggtatcgagcccatgggagaaccacgggtctaaaatctcgtttgcgtagcttgggcttacggtggtgacgcgcgttgccgtttcaatggcgccctttaccatgttgagcttgccgtcctgctcaagcagcctcgtttccgccggcggaatgccgacgcattcggtattgacctcccatccgtacatgccctggtactggatattatggatggtaaagatgctcttgatgttgtggtaccatgggttgtgcgaatagaacaggtagtaatatgtgggtataagcgccgtctgccagtcgttgcagtggacaaggtcgggatggaagttgacataggggagcatttccataaccgcccttgagaagaacgaaaagcgctccgcgtcgtcgtaaaagccgtacaggccgctgcgcttgaagtaatattcgttgtcgataaagtagaacataacgccgttgtagtgcgcctcaaaaacgccgcagtactggcgcctccacgcgacagggacggtgaaattcgtaatatagcgcatgctgtcgcgaagcgactgcggaatatcgccgtaaagcggcataacgacgcggcagtcaatctgccgttcgcacagcgccttgggcagcgagcccgcgcccgcgacgtcggcaaggccgccggaaccggcaaaggggtttgcctcgctcgtgcagtataaaattctcactcaaaaaacctcccggattttgcacaaaatgcaattgatacgaaactattataccacgctcatcttcgcaatgtaaataggatagctctgataacccatcaacgcccgttcgtccttaatcacaacgtccttgtcgcagataacgtaattgaggttggcgtttgcaccaatttttgtgtcctgcatgatgacgcagttcgacaccttcgcgccctttccgatatgcacgcccttggagacgacgcagttttcaacctcgccgtcaatgatgcagccctgggcaatcagcgagtttttcacggaggagccaaggccgtatttgctgggcatatcgtcgcgcactttcgtataaattgggcgggaaccattaaacagctcggcgcgcatctttggttccataagcgccatgttcgcggcaaaatagtcgtccatcgacgaaataacggcgctgtagcctgtgagctcgtagccgtaaaatttgtatttcctgaaattgtcctgcagcaggtggcgcttgtaatcgagcgcgttgcggctgatgcagtctgtcacaagctccatcaggagctcccgctttaaaagcacgctgccggtagcaaaattgcattcgccctcagggcggggctttacgagcagctcctccacgcggttgtcggtcccaagctctaatacgattgcctgctcccggtgctccgggacctcgccggttttatataggattgtaatatccgcccccgacttgatgtgggaggatatcatcttctggtaatcgatattgaacacacagtcgcactgcgacagcaggacgtattcctcagaggagttgttgataaagccgcgcacaccgtaaatgctttcgaccggcgtgttgaatttgctgtagccctgcgaaaaaggagggagcacggtaagccccccgcgcctttttgataaatcccacgccttgccggagccgacatggtccatcagggacgcaaagttgttgtttgttatcacgccgaccttgttgatgccggagtttaccatattggacagcacaaaatctatcaggcggtattttccgccgaacggcacggagcccatcgtgcgcttggccgtcagctcggaaatcagctcgtcgtgtatgttcgggaacacaaggcccagtacgttgtttcctctcatgccttttccacctccggtatgtctttatctatcatggccttcggcggcactacggcgtttgcgcccacagtcaggttgtcgccgaccacggcgatgccccaggcatccttgtcgctgatatcctctggccgcgcgccgaccaccgcgtttttgccgatgaccgcgttttccgcgacgattgcatactgtacgacagcgccgtcctcgataaccgcgccgggcatgatgatggaatcggtcacgactgcgttcttaccgaccgttacgcccgcgaacaggatggaaaactccagcgcgccgtaaatattgcagccgtccgccacaagcgaattctggattttggctgcgtccgcgatataatgcggcggcatgacggggttgcgggaataaattttatggctgtcctcgcttaaatcgagcgggacgttcgggtcgagcaaatccatgtttgcttcccagaggctgtcgattgtgccgacgtccttccagtagccctcaaactggtatgcaaacatccgctcgccggcactgagcatagcaggcagaacgtccttgccgaagtcattgctggagccttgctgtgccgcgtcgagcgttaagtattttttcagcttgtcgaagctgaacacgtaaatgcccatggaggcgtttgtgcttttgggtacggcgggcttttcatcgaactcgtaaatagagccgtcgggattggtgttgaggataccaaagcgcgatgcttcctcaagcggtacgtcgataaccgcgatggtgcagtctgcgttgtgctccttatggaacgcgaccattttggaatagtccattttatagatgtggtcacccgacaggatgaccacatattccgggtcataccgctcaatatagttcatgttctggtagatagcgtttgccgtgcctgaataccagtcggcgccgcctacctgctggtaggggctcaggcagtgcacgccgtcgagcatgccgtccaaatcccacggctggccgttgccaatatattcattgagcacgagcggctggtactgtgtcagcacgccgaccgcttcaataccggagtttacacagttggaaagcggaaaatcaataatcctgtacttgccgccgaacgggaccgccggctttgcaagcttttttgtcaaaacaccgagcctgctgccctgtccgccggccagcagcatggcgactacctcttgcttcggatacataccgatacctccaaattgccgatatattttgcagataaccgaaaaccacggttatttgccttcgttcgtttggccgctgtcctgggcggctgtttccgactttttgccagcgtcctttttggcgggtgcctttttctttctgggcggctttttcctgatgcacttaaagtacatgacggacatcggcggtaaggtcagaagaatcgactggtcgcagtcatgcagcgcctcgccgtcggaattgatgttttggccgtttgtaatacccgtgccgccgaagcgctcgtcgtctgtattgaatacctcggcatagtagccgttttgcggtacgccgatgcggtagccctcgcgcaggaccggctggaagttgcacacgccgatgatgttgttgccctttttatccatcctgcggaacgcgatgacgctctgcatatagtcgtcatggtgaatccaggagaagccctcccaggagaaatcgacctcgtacatcggcgggttttccagataaaaatggttgagcgccttgtaaaactcatggagctcctggtgcttcgggaattcaagcaggttccattggagctgctgggttgcgttccactcgtcgaactggccgatttccgcacccataaaggtgagctttttgccgggatgaatcatcatataagccataaaagcgcggacgcccgcgaatttctgttcatattcgcccggcattttgttgataagggagcctttgccgtatacgacctcgtcatgcgaaatcggcaaaaggaaattctcggaaaacgcatagaagaacgagaaggtcaggttgtcgtgatgataggggcggtaaagcgggtcgagcgacatataatgcagcatgtcgttcatccagcccatattccacttgtagttgaagccgagcccgccgtcctcaacagggcgggagaccattggccaagaggtggattcctccgcaatcatataatcctgcggatagagcgcggcaattttggagttgaggttctggataaaggcgaccgcctccagatgctccttgccgccgtatttgttggcaacccattcgccgtcgtggcggttataatcgaggtacagcatcgaggcgaccgcgtccacgcggattccgtcgatatggtacttgtcaagccagaacattgcgctcgacattaaaaagctgattacctcaaagcggctgtagtcaaaaacgagcgtaccccattccttatgctcgcccttgcgcgtgtcggcgtattcatagcagcaggtgccgtcgaattttgcaaggccgtgcgcgtcacgcgggaagtgggcgggaacccagtcgagaatgacctggatgccctgttcatggcatttatcgacaaaatacataaaatcgtgcggcgtgccgtagcgggaggtcggcgcaaagtagccggtgacctggtagccccatgagccgtcaaacggatattccgtcagcggcatgaattcgatatgcgtatagcccatgtccttgacgtaaggaatcagctcgtcggcaagctttcggtagctgtagcgcgagccgtcttcacccagcctccaggaacctgcgtgtacctcataaatattcattggccgctcataatgcggcttttccgctttcttttcctgccagcccgtgtcggtccattcaaagccgtccaaatcataataaagcgacgcgttgtcgggacgtgtctggcagtggtagccgtatgggtcggttttatatagcttttcaaaccagggcgtttccacacagtacttatatgcctgatattggttgacgttcgggataaagcattcccatacgcccgtaccgtccacacgctccatatagtttttcatgttgtcccagctgttgaaatcacccgcgacggaaaccgtcagggcgttcggcgcccatacacggaacaccacgccgtcgagcccgtcccgataacatttatgcgcccccatatattcgtatgcgttgacgctttcacccgcaagaaataattcgagcggggaacgtgaatccaccttcgcttcggtagccgttattttttcgtctgccataagtttttctccttccgcattctgtaatgtatatatcggttcatccatgatatttcccccggacgtaaaagaataaaaccctgtacaaaaaggagccgatgcaagatttttcctgattttttgccaatatatacaatctctccataatataatagcaatgtttcggtaaaaattcaatagatttttaaattttaattccacataatttagtaaaatttttgtgatgtacccaaaaacggcgctgtatagcgttaaccgccgttgtgccggaaatcaggcattttgcgaaaacacgcccatcataccatcgcggccctgtcgaaaaggcgaaaagggcgcgcaattcacggcatatttttttggctttaaaattcatagtaatccgatatgcttatcttatcataaagtatgcgggcttagcaaaaacaattgttggcagaaaacctgttttgcatgagaaaaatattcaccccagagccgattgtcctttttcgcataatcctttataatagaaaaaaggagatgaacgggttgctttatcttttaattgctgccattttaattggaattacgatacctgtctgcattggcgcaagcatcggcaaaaaaacaaaagcggcgctgattgccgccgcctcgctcgtcacggtatttgccgtggttgtacttgcgcggcccatttatatcacgcaggcggacgcgacgcgggaggacaaactggctcagaagctttcagagggctattttggatatgagaagctcgattttttcggcggcgtttccgaatataaaataaaggaagcgtccttatttcctgaggaagataaggcttacctctatgtcatctatgacgttaagccttatcgggataacgtcaacggaataaatgaatgggccgcaggcaatgggactaccggcgaaaacggctggattgtagagaaaagcgggttttacgggtatgggcacttcggcggtttttattttgtagcctttgttggaaccggactttaatagggaaggggagaggaaaatgagtgtgcgcgggaggctgttttctgtaaaacagccttatcttttggaggaaacaaacgggctttttctttccgcgatgcgggaaaactgcgcgtaccagtataaccactgcgggccgtaccgcaaaattctggacgggcttgggttcgcgccggaacagctgagggtatatgaggaccttgcgcgcctgccttttttgccgacgctctttttcaaatcgcacgagcttttgaccatgccgaggggcagaacgccgatagaggcgacctcatccggcaccagcgggaaaatgagccgtattgcgttcgatacatacggcctgtactgcgggctgaaaatggtgctgcggctcggccggctgcatgggctgttttccgcggttccagctaattatgtactgctcggctacaagcaccataaaggaaaccaaacggcaataacgaaaacggcgtttggcgcgacgctgtttacgcctgcaatccatcgggaatatgccttgaaattcaaagacggcgggtacaaagcggatttggacggtgtaatctgcgcgcttttaaaatacagccgctcatcctttcctgttcgcctggtcgggttcccgtcctacacctattttctgctgaaatcgatggacgaacagggcatttccctaaagctgaaaaagggctcgcgaatcctgctcggcggcggatggaagcagttctaccaggagcaggtggaaaagcatatcctgtaccggttagcggaaaaggtactggggattgaggagaataagattcatgagttttttggcgcggtcgagcacccggttttatattgcgactgcaaaaaccatcacttccatatcccggcgtacagccgcgtaatcatccgcgacgccaatacgctcgagccggtaaaaaacggggagaccgggcttgtcagcctgctgacgcccatggtatacggcgcgcctgtgctcagtgtgatgacagacgatttgggcgtgctgcatgacgcggcagagtgcggctgcgggatagggtcgccgtatcttgaaatcatcggccgcgttgggctcagcgacatcaaaacatgcgcggcgggcgccgccgagctgctcagggggctggagctatgatactttttaaagggaagctatatggttcggacgagcaaagcgagctgctctgccgcatggaggcccaaatcaaccagacgctcttgagggagccgcccggacccgaatatgtaatcggcgcgttcgacaggcttgcagaaaaaattgaaagcggcgcatatgatgaactgattgaaaagctcgatattgaggggatagaggaaaaaatttgtgaggcggcgtcactgcttaaacgagacagccttcagtttaagctggataccgagctgggcagggatttttttatagaaaaagaaatctgcccagtacgcgcgggcaggacgattgtaaagcgcgccctgccgctcggcgtgctgttccatatcgccgcgggcaacgtggacggccttccggcctacagcgtggccgaagggctgatgacgggcaacgtcaatatcttaaagctgccgcaggcggacaatgggctttcaatccggattctctgtgaattgattgcgaccgcccccgcgcttaccgattatatttatgtgttcgacacgccatcctccgatattggcgcgatgaaaaggatggcggagatgtcggacggtatcgtcgtatggggtggagacgaggcggtttccgctgtgcgcagtatggcgcctgttggcgcaaggctgatagaatggggccataagctaagctttgcctacctgtccggagcgccttccaatgcagagctgcggcagcttgcgcgccatatcatggagacaaagcagctgctgtgcagctcatgccagacgatttatatcgatacggacggtatggaggacgtgtatgccttctgccggcggtttttgccggttttggaggaggctgcgcaaaaataccccgtaaaaagcataggcgcgcaggctgaaatttccctgcgcctttaccatcagaagctggacttgctggtgtcggggcaagaggaagcggcgcagcgggtttacaagggcagggggtgcagccttttggcctgtacggacaaggagctagcgctttccctgatgttcgggaactgtcttgtcaagcggctgccccgtaaagaaattatcccggttctgcgccgtaaaaagggctatttacaaacggctgggctgctctgcgggacggaagaaaggcaggggctgaccatgctgctgctcaaggcgggagtcgaccgggtaacgggcgcgggtgatatgtccggcgttacctgcgcagacacgcacgacggggaatacccgctgcggcggtatgtcagaatgacggacagcagtgggaattttgtctaaacgtataagaacgcctgcgcattgattaagcgcaggcgttttttgcgatgattaccgtttaaccggggacagcgtccatctcgtgtgcataaatccatgaaagccgccgcccgatacgatgaacctttttgttctatgccttcctccgctgcggttttgtctgatgcagtcagaggatactggctatatgtcatgcttaacaaagcatggcaggccctggaatcaaataaaaccaagggcaaaaacaaaccggagaagacgccgaggcatcctctccggtaaaagctttgacagaacgcgggccagaatacccgcactgtaaatttgcagattatttaattacagctctgcgaaatatttgattgtcctgaccatctggctggtgtagctgttctcgttgtcgtaccaggatacaacctgaacctcgcttgtgccgttgtcgaggttgatgaccatggtctgggtggaatcgaacagggagccgtaggtaatgccgatgacgtcggaggaaacaatcgggtcctcattgtagccgaaggactcggaagaagccgccttcattgcctggttaatctggtcaaccgtaacagagccctctacaatcgcggtcagaatggtcgtggagcctgtcggtaccggtacgcgctgtgcagagccgatgagctttccgttgagctccgggataaccaggccgattgccttcgcggcgcctgtggagttcggtacaatgttgacagcagcggcgcgcgctcttctgaggtcgccctttctgtgcggtccgtcgagaaccatctggtcgcctgtgtaagcgtggattgtgctcatgatgccgctcttgataggagcaagcttattgagggcgttggccatcggagcgaggcagttggttgtgcaggaagcggcggaaatgatggtgtcttcctttgtcagggtgtcttcgtttacgctgtaaacaatcgtcttaaggtcgttgccggccggagcggagatgacaaccttcttggcgcctgcgtctatatgagcctggctcttcgccttggagcagtagaagcctgtgcattcgagaacaacgtcgatgccgagctcgccccagggaagctcagcggcgttcgccttggcataaatcgtaatttcttttccgtctacgacaatggagttttcttttgcctctacaggcttgttgtaacggccctgggcggagtcgtactttaaaaggtgagcgagcattttcgcatccgtaaggtcgttaatcgcaacaacctcgtagccctctgcgccgaacatctgcctgaaagcaagacggccgatgcggccaaaaccgttaatagcaacttttactgacataagatttacctcctgaaatttgaaacttttggttaacatccctatcatatagcatttttacggagaatacaaggctttgacaaaaatttaacaaaaattttttatctttttcataacatagggccattggattttattgtaacgcaataaatgcgataaaacaggacttttttatgaggtttgccgttttttcaggcgggaaggggttcttttttatatgcatttttatacatatatatacaaataatccttgactttcgcagcgattgaatataaaatagataaagataaccgcaaaatatgcacctccctgttaaggccgggtgcgtttgttttgtggaaatctgctcaaacgcggaaaaaccgccgtttgttttttttaattggactcttaagaggccgttatatatagataaaccaatctgtgtaactggccgcgccgatgccgcgcggatgagatacattgtccctgtccccaagggcagggggtttgttgtgtttattttttgcagacaattgaatattatccgtaataacggctttcttgagttgattccttttatcattcttacaaattatggaaacgatgaaaaatcaaatcaaggaggtgtcaattcagatggatttatggttggcgattgttttaatcgtcgtcatcgcggctgtatgcggcgctgttgctttttttgcgggaattaaccaccggaaaaaaattgctgaggcggaaatcggttctgccgaggctgaggctaaaaaaattgtcagcgacgcgctgaaaacggcggaagctaaaaagaaagaaaccatcttagaaggcaaagatgaaatccaccgcttgaggaacgaagcggacaaggaattggcggacagaagaagagaggttcagcgccaggagcgcagaatccagtcgaaagaagaaacgctcgacaaaaagcttgaaaatctggaagtcaaagaagaaaacgtcgcgaagaagctaaaagcggcggaagaaaagttcaacgaggccgaaatggtcaaaaagagccagtttgaaatgctggaacgcatttccggctatacggccgaacaggcgaaggaatatctgctcaaggagctcgaggatgagctcacgcatgaaaaatccgtcaaaatcctcgattatgagcagcagctcaaggacgaggcggaaaataaagcgagaaatgtcatatcccttgcaatccagcgctgcgcggctgaccatgtggcggaagctacggtttcggtcgtcccgctcccgaacgatgagatgaagggcaggattatcggacgcgagggcagaaatatccgcgcgattgagacgctcacgggcgttgacctgattatcgacgatacgccggaggcgattacgctctcgagctttgagccggtgagaagggaagttgccagggtcgcgcttgaaaagctaatctcagacggcagaatccaccccgcgagaattgaagaaatggtggagaaggccagaagagaggtcgaaaccactatcaagaaggaaggcgagcgcgccgttatcgaggcgggcgtcaacggagtccatccggagcttatcaagctgctgggacgcctgcgctaccgtacgagctatggccagaatgtgcttaagcattcgcttgaagtcgcgtatattgccggtatgatggcaagcgagctcggcatggacccgacggtcgcaaagcgcgcgggccttttgcacgacataggaaaggcgcttgaccacgagatggagggttcgcatatcgagctcggcgtggaagtcgccaggaaatacaaggaaagcgaagcggtcatccatgcaatccacgcgcatcacggcgatgtggaggccaagacggtcgttgcgtgcctggtacaggctgccgacgcgatttccgctgcaaggccgggagcgcgccgcgaaaaccttgaaaattacatcaaacgtttgcaaaagctcgaagaggtcgcttcctctttcggcggtgtagaaagctgcttcgctatacaggcgggccgcgaaatccgcattatggtaaagcctgaggtcgtaaacgacgagcggatggtcccgctcgcaagggaaatctgcaagaagattgaatcagacctcgaatatcccggacagataaaggtaaatatcttaagggaaagcagggcaatcgaatacgcaaaataactaagaattttaagagggacggacgccggctggcgtccgttttttgtttgcaggaccattttataatccatccgcccttcaaagagaattttttacatgtcaaaagttgaccggatatggttaactttttcttttttgtaaggaattatgaaagggggcgcgtgaatttgataagcgtacaaaataaaaggatgattattccggaagaggaacgtgttttgggtttcctgggcgaccatctcacagggaaaagagagttttttatttccggcggctacagcggggatatgcgggtacggctgtttctccgcttcaaaagcggagcggaaaactttttcgtcctggagccatgcggcgggcaaaacggcgggacactttgctggaatattcgcagagaacacatttttgaagacggaatcgtccaggcgcagctcaaggtttatcagggagaggaagaaatctggcacagcagcccggacttttttcttgtactggaatcccttgaaatatcaaaccctccccagattcccacagaatttgaggagctggaacaaaaagtgaacgagaagctggacgcggtcaggagggcatccctgaaagcgccggttattggagaaaacggcaactggtttttctatcaagagaaagcggacgtatatcaggacagcggcatttccgccaagggggaaaagggcgaccggggagaattaacggaaagctgcgtggagacccggcacctatcggcgggcgctgtaactgccaacaaaattgcagagcgttgcatcggctcgcagcagctggcgggacagggtgtcctaaatgaaaacctcggcaggtactgcgtatcggccgacaaaatcgagccggagtgcgtaagcagcggcaagctctccaaagactgtgtgacggcagacaaaatagcggcgggcgcggtgacggcagataaaattgcagtgcgcagtatcggctcgcagcagctggcgggacagggtatcctgaatgaaaacctcggcaggtactgcgtatcggccgacaaaatcgagccggagtgcgtaagcagcggcaagctctctaaagattgtgtgacagcagacaaaatagcggcgggcgcggtaacgagcgataagttatcgcaggacagcagggattatattgaacagcggataaggcttgaaaaatacagcctgccgcttgattcagaaaaagttctaaaaatcgacaataccttaagcggggacagttacgcactgcgcgcatatcatgatggtggggtagccgtttcccatatcgataccgggacgtttttctcatttgataaaaacggtgtccggcggctcgacggcgtgggcgccagcattttgacggaaacaaaaagcggaaagcttgtaactgccgcacagggtatggctggaacaaagctccatcagctattggttcagggagaatcgattgtcaatgaagatgcggacggcacgcaggcattgtctgcatccattttgtccgcctgtactcaaaacgggctgaatttattgaaattaaaggaagaccggcgcacagccggaggcctggccgtagcctgcgacggcgacctgattgcaatcagcggaacgtgtacggggacaaacctttatttctttgaccagattacccggcccgacgtaccgtttacccttcatatccaggtgcttgccggcagctccacgggagctggaatgtattttacaccagatacgctcgttgcgtttaaaacacagacgaggtatttctcaaacggagctccagactggaagggaacctccctgtggcttacaaacaacaccatttttaccgacgattttacctgccgtatatgggcgacgccgggtgactcgcctgaaatcccttatgaaaaatatacggagcaaatacagagcctgccgcaggaaatcgccctgtacagcacgccgcaaaatgaatttcgggatacctataacttcttgtcgggttcaaaaacagaaaactgcgccgttgtccctatgtcttcgggatggctttacgattataatgagaagctggaaaatataacctggattacatctccaataagccccgccaacaaaaattattactattattgtaatggcgccgtaacggctgcaaacgccacggattggcaggggaaaatacaaattactctgccaaaggcagagctgggcatcacaggcagcgacaccgcggttcaggcaagggagaaggcgctgggctattttggcagcgcatttgcggttgtaccgcttaaaacaccgctggcaaagcagttccctcccgtttccatgaggctgtccggcagcgtttgcagctgcaatgccggagagctttccctgacatatgaacgtgacctgaacgccgcttatcaggagcttgctgcgttttctaaatcactggaagcgcgtattgcacagctggaaaagcaatagggacggttatttctgcaattacatacccgtataacagaaattcatctaaaacgggtatgaagccgcttatcatacggtacgcaagcggctttaacttaaaggagctttactgtggctaggaaaatatatttatcgcccagcaaccagaacgacaataaatacgctgtgggcgatacgaatgaaatggtacaatgcaataaaattgcttcttccgcaaaggaggcgcttgcccgctgcggcttttctgtgaaaaaggcggcacagggacaatcaatgtacgtaagcgtaagagaaagcaatgaatggggcgcggatttgcacataccaatccataccaacgcctttgacggaaaaacgacaggcggaacgcttgtgatgctttacagctccgaaggagaaaattaccgggcgggaaaagcaattttaaacagcgtaggtccgattacgccgggcggcgattacgcaatacggaccaataaggagctttacgaattgaacgcgacctccgctaccgccgtatataccgaggtggaattccacgatacaaaggagggcgcggcttttataatcggcagtaccgaaaagattggggaggctatagcgaaaggcgtgtgcggcttttacggcgtgccataccagccgggaaacggcggttcgcaggagaacgaagatataaccctggaaatgtaccgtgtaagaaaaacgtggagcgatgtgaaatcccaaatcggcgcgtttaccatgcttcagtacgcgaaggagatggccgatgaaaattccggctattatgtgtttgacagcaaggggaaaaaggtttatacgccgcagacacaggcgaaagccctggaactcaaacacacacccttgtatgtgagcgcttctgccgccaaacagtctgccgaggtcaacggaacctactaccgctgggacgacgaggttgtaagcggcagggtacggattacaagcagcaggaaaaatattgggaaagccggcgaggtgaccggctgggtcgatttacagtatacggtatgatgactcaaaaatgttctgccgcagctgctcggttatgcggaacgtaaaaaggaaaaaataacaagcgaacgatgatttcggcgcgccgggccataaggctccggcgcgctttttcgtttttttctgacgtgtaggattggcaaacaaaatagatttttcatgatgtaccgccttacggcgaaatgatggattgctttgcaaaatgatgtgccttcgctccgctgcggcatgatgtaatgtttgcctttatgtcccgcgggacacatcatcgcacgaagtgcggcatcattgcccgaaagggcaacatcattctaaaaagtcctttatgcagcgtggtaacttcaatacaacccaatacccgtatatcctcatcttcctcattttttgtttccggctgtccaatatcaattgtaatcctacatgctttttcgtttttttctgacgcttgttgtagaaaaacggaaaacctgttataatcctttatatatacgaaaaaataaaacgaataggaaatggggaacgactatgccagccaaggtcacattattagcttttacgccgaatccggaacagacggtcgcgtgcgcggcgaagctttgctattcgccgtcggatattgcaacggtaaaggatgggcttacagaggaaaagacgtccgcttttgtggacatgctggcggcaattgggcatgaaagcccgattgagcacgcaagctttacgttcggcatagagggcgtttcccgtgcgcttctcgctcagattacgcgccacaggattgcatcctacagcgtacagagccagcggtatgtcaaggaagcgcagtttgaatatgtcctgccgcctgaaatcgcggctgttccgcaggcaaaggaggagtttctccgcgctatggaagaggaccagcgccattacgacagtataaccgctatattaaaggaaaagcatcgggcggaatatatgcggcagggtcttgacgaaaagggagcggcaaaaaaagcggagaagcaggccattgaggatgcgcgcttcgtccttccgaacgcctgctgcaccaaaatgatttgcacgttcaacgcgcgcagcctgatgaactttttctcccaccgctgctgcaaccgggcgcagtgggaaatccgagacgtcgctatgcagatgctccgcctttgcatggaggccgcgccctcgctctttaaaaaagcggggccgccctgtaccaggggcggctgcacagaagggaaaatgacctgtggaaaagcaaaagaggtcagggaagcgtttgctgaaatgcgcgagaaggcggaacagtaatggcaaagctgattgtaatagaagggcttgacggcagcggcaaggcaacgcagacacgcctgcttaaggaaagccttgaaggaatggggaaagaggtaagaaagcttaccttcccggattatgacaacccttcgtcggcgcttgtccggatgtatctcgacggcgtgttcggtgataagccggacgacgtcaacgcttatgcggcgtcggcgttttatgccgtcgaccggtatgcaagctaccggcagttttgggaaggcgattaccgcagcggcaaaatcatacttgccgaccggtatgcgacctccaacgcgatttaccagctgacaaaggttgaaaatacacagtgggacgggtttctaggctggatagaggattttgaatataataagcttgaaatcccgcagcctgacctggtgatatacctcgacatgccgccggatgtttcacaaaagctcatgacgctgcgttacggcggcgatgaaagcaaaaaagatttacacgaaagcaaccgcgcatttttatcgcagtgccggcggtccgcgctttacgcggcaaaacggtacggctggaaaattatatcctgcgcgcagggcgaacagccgcgtgcgattgaagaaatcgggcgcgatgtgctcgccgcggcgcaggctgtcttatcaaattaaaaaaccgagggaatatatgtatgctagaatttaaggaaccgacaatagaggacaggcagtgggtaaacgagctggtcgagtgtgagggaagggataaaacccttttgagctatgacgttgcgttcggtacaaattttgtctggcgcggcatgtacaatataaaaatttgccgttacagggattttgtcctgaaaaccttcggaaaagacgaaaaaacgattcgctacgcgtttcccgttggagcaggcaatatcaaggaagcgctgggcgcgctgatggaagacgcgcgggagcgtgggctcaagccctgtttcggcggcgtgaccaaggagcagatggaaatgctcgagtcctgctttccaggcgtcttttccttccgtgaggaccgcgactattttgagtatatttaccttacagaggatttggccgagcttaaaggaagaaaatttcatggaaaacgcaaccatatttctaaattcaaaaaccagtacgattacacgtttgagctgataaacaatgacaataaaaaagacgcgctgctcgttgcaaagctttggtgcgagcagaatgtgctcggcgaggacaacggcctgacacatgaaatttgtgcaatcagggaggcgttccgttatttcgacgagcttcattttaagggcgccattatgaaaatagacggaaagcccgttgcaatgacagccggggaacgcgtttgcaatgaagtgttcgtcgtgcattttgaaaaggcgctgcccggctacgacgggctgtacgccgcaatcaacagcttttttgcaaaggagcttacagcgtataaatatatcaacagggaagaggacctcggcatcgaggggctgcgcagggcaaagctttcttacaggccgagcattttactggaagaatttgagggctgtgcgcaatgaacgcctatctgacagcgccgcgcgatagggcggaggagcttaagcggctctaccaggcctgctttgatgaaaaggacgaggcggtacgtattttgtttgaggaatacggcctggcacagtactgccatgccgccttgtgcggcggggaaattgcggccgcgctttatttgctgcctgcccaggctgcggaaaacggccgcgcggtacaggcgcattacctgttcgcggcgggtacgcttccgaaataccgcggcagggggctcatgaacgggctgattcattacgcgctttcctgtgccgccgcgcgcggcgaccggtattccgcgctgcttcccgcaggcagggggctgtaccagttttacgcgcggtttggctacaggcccgtttaccggtcaaaatgcgccgcggcaacacaggcgcggctgtttagcctgccagcagaaacgtgcaaggtcataaattgttcatttgacaagctggccggtttacggtttaatatattgttagaacaaaacggcagccttttgtgggacagccgccatcttgcgcttgcccaaaagctttcgggacagtacggcggcgggctgtttacggcggacaaaggcgcggtttattatttgcgcgagggacagaatgtctacgcgcatgaaattatttgtaaggacgcggatttaaaaactttgctcaaaacgtttgccatgcaggttcccgcaaagctttaccggctcaggctgcccgcttttatcggcagtgccggcggtatggcgcgctgcggcatgataaagcccttaagcaaagacgcgctgccgcctgccgcgatgcgctgcccctacctgggattggcgcttgactgaaaaggaggaactacaattgatatatgtttttcttgccgacggttttgaagaaaccgaggcgctggttactgtggacattttaaggcgtgcgcagcttgacgtgcgcacggcaggcgtaggggcaaaacaggtgaccggctcgcacggcattacggtcgttgcggatatgacggaagcggaaattgaaaaagaaacgattaccgctgtcgttctgcccggcggaatgcccggtacgctcaatcttgaacagtcggaaattgtcaaggattgtgtgcgctgctgcgcggaaaacggccgttttatctgtgcaatctgcgcggcgccttcaattttagcgcatatgggcctgctggacggaaagaacgccacctgcttcccttcctttgaaaaagagctggccaatgcgaatttaaccggggctccggctgtggcagacggaaacatcataaccggaaaaggcgcgggcgcaacagtggagtttgcgctgctcgccgcagaaaaaatggcgggtaaggaaatatcggccgaggtaagggcggctctccaatgcccgtaagaaacattagggaaatcaagatacagctccgttctaaaattaaaaagcagcgtacaaatatggaacccctgaaacgggagcggatggacgccgatatcaggaagcgcctgttttccctgtggcagtataaaagctgccgccagctttttgtttatgtctcgaaggatattgaggtcgatacaaagcagataatcctacaggcgctggcagatgggaaaaaggtcgccgcacccaggtgcattacggaagggagcctgatggacttctattacatttcttcccttgcggatttggaaaaggggacctttggcgttttagagccgaagccggacgtgtgcaggaaggccaccgatttttccgacggcgtgtgtatcgtacccggcttatcctttgattcggaagggtacaggctgggttatggaaaagggtattacgaccgtttcctcaacgattttgacggatgtaaaatcggtatttgctacagcgcatgcgtaaagtgggagcttcctcacggtttttatgacaggccggtcgatttgctggtaactgaacggtatttccgaaaaatccataaagaaaagcgtctcaacgaaaaaagctgaaattttttaaattttaggtaaaatttccttctttttatggtataatgatatttaattaaaatttatccatgcctgcggaatattccgcggcacaggaggattctttatgaacgaggattacaccccgaaaaataaaaacgggtacctgtcgggcgacggcactccggaagagcaggaaatcgcccaggcgcgcaaaaaaaagattgaaggcttccggctttccatcgacgatttggcggaagagccagcggctttcaaccaagatgaaacggagctgtttaacaggcgtatgcccggagacgacgttgtggacgccattttgaacgatacgcattccgggcaggaagagccgcaggccatcactgaggatattacgagctttagtggggaagaacagaagcagcgcatggacaaagcggaaaaggaagcgctgaaaaactataaaaagtccgtgaagaaacgtaaaaaggaaaaggcggagcgcaacggctgtcttttccggtttgtgtggcttgcaatggtcgcgcttgtagcggttgtgctgggcatgttccttgtgaccggcgtgaacgacctgcttgcggtttcacgcgcggaggagaataagacgcttgtaacaattccagaacacgcaacgcttgaccaggtaacggaaatcctcagtgaaaacggcgttatcaacgagccgtttttcttcaaggcatatgcgaaggttacaaaatcgaccgagggcttcctgccgggcagctataatatggacacaaacatggattatgaggccatcctcaattacctgctttacaattccgggccgagagaggtcgtgtctgtccagttccaggagggcctgacggtacgcgaatgcgcaaatctgctgcaggaaaagcgcgtttgtaaagcggaggacttcatgaaagcctgtaattccgacgcgttcgacgaggactacgactttatcgcggcaatcggtaaggatgaggatagggtatataagctcgagggctatctcttccccgatacctatgtgttctacgtcaatgaggaagcggaggaagtagtcgtcaagttcctcgacaacttcaataaaaaggtatttaagaataaaacaaaattttccggctacgatgaggaaatgagcgtcgccgagcttgcgaagctcaagggcatgacggttgacgatttaatcaacatggcctccctcgttcaggcggaggcggccgatgaaaaggacatgtactacgtttcctccattttctataacaggctcgctaccgataaatgggacggtacgaacgaatatggcgacggcgatttgaacaagctcaaatccgacgctacgatttactatccatattcctcgctggaggatattccaaaggatatcaaggatacgttcaagagcaaatacaacacgtacaatattacggggcttccgccgggaccgatttgtaacccgggctcggtcgcaatcaacgcggcgctcaacccgaaggatacaggctattattacttctgccataaggcggctacggagaattctcccgctgaggcgttctacgcatacacgtattacgagcaccagcagaatatgaggaaagcggggcttctcgactaaaggcggcatgatttgaaaccaaagggcgtacagcttatcttgtacgccctttctttcagcaagaaaatgattaaaaggaaatgcggggttttttctatggggctcacttcaaaacggcatgaaatactcgcgcccgcgggcgatacggaatgccttctgagcgctttgcgtttcggcgcggacgctgtttacctggcggggcaggaattcggtatgcgcaccgcgccgaaaaattttgacaacgaggggcttcgtaacgccgtaagccttgcgcacgcacagggggttaaggtatacctgacctgcaacacgctgccctccaatgaggaaattttacgtttgccggagtttttggcgtttgtgcaggacgcgggggtggacgcccttattatagcggacatgggcgtgctcacgctggcgaaaaaatacgcgccccgtgtgcagatacatatctcaacacaggcgggcatcgtcaactttgaaagcgcaaacgccttttacaatatgggagcttcgcgtgtggtgctcgcgcgcgagcttacaatcgaggacattgcgggcatccgtgcgaaggcgccgaaggagcttgaaatcgagtgctttgtccacggcgcgatgtgcgtttcgttttccggcaggtgcctgatttccgcttacctgacgggaagggacgcaaaccgcggagactgtgcccagccgtgccggtggaagtaccacctgtacgaggaaagcaggccggggcagtattttccagtagaggagaacggcgggggcacttacctgtacaattcacgcgatttatgtatgatagagcatatcccggagcttgtaaaagccggcgtgacgagctttaagattgagggcagggcaaaatccgcctattataccgcggttgttacgaacgcctaccgcaaggcgctcgacgattattatgaaaacggcgggcgggagcattataaagtgccgcagtggattgcggacgaggttcataaaatcagccacagggaatattcggccggcttcttttttgggagcgagcctggccagacggttaaaaacggcggctatatccgggaatatgaggtcgctgccgtctgtgagggaacggcgggcggcaaagcgctcattacacagcgcaaccgcttcttctgcggggacaccttcgacgtactgccgccaagcggcgtaccgtttgagacaaagctcctcacgctttccgacgaatacggcaatccggcggagagcgcgccgcacccgatgcagcggctgctcgcccaaacggaaagggaaatccccgccggcagctacctgcgtaaaaggcgcagcctgtgaagaaacgcgcattagagaaaagcaacgaaaaaaaaggggaattttaaataaatttttgattgctttttttagtcttatcctttaaaataatatgatggtgatacttgtgaagagcgtgttgattgtatccaaaacacagcagagtataacacccttgtccagtctgctcgaggaggagggttactgctgtacggccacggcgttctcttcacgggaagcaaaagaaaagctgcatgacggcgcattcgacctgattgttgtcaatacgcctctttgcgactgttccggtttggagctttctttttatatggcggacaacacgcgcgcgggcgttttgctttttattaaaagcgaggcgctggggcagtgccgcaaaagcttggaggaacacggcgtttttcccgtcccgaagccaatcagccgcagctacttccaccagacggtcaaaatgtgggaggtttcaaagcgcaggctcatggggcttgaaagggaaaacctggagctgaaaaaccaggtcgaggaaatcaagctgattaaccgggcaaagctggtgctgatgcaatgccttgcgatgagtgagccgcaggcgcaccggtaccttgaaaagcaggcgatggacatgcgccaaagcaagcggaaggttgccgagcaggttctcaacacgtatgaaagctaagggaatatcctccaaaaagcttgtgcataataggcgggagccggaaaatttttttatcattttccgctttgccgcgcggaggcacacgccttaaaaagtataaaatgggaaaggatttgatatatatgggccgcagggcatacctggtattggaaaacggcaaggtgtttgagggcgagagcttcggcgccgaacatgaagtgacgggtgagctcgtctttactaccgcgatgacaggatatcttgaaacactcaccgaccccagctattatgggcaggtcgttatccagacgttccctttaatcggtaattacggggtgattccctccgattttgaaagcaaaaaacccgctttgaaagcgtatatcgtaagaaataggtgtcaagaaccttctaactaccgttgtgagggtactcttgacacctttttaaaagcctcaggcgtgtccggcatgtatgggctggacaccagggcgctgacgaggattgtgcgcgaatacggcgtaatgaactgcaggcttacttattctcttgacagcctggagcaggatatagaggagctgaaggcttacagggtaaaggacgctgtaaagtccgttacaaaaacggaaaatgaagtatatcaggcggaaaacgcaaaatataacgtcgtgctctgggacttcggggctaaggacaacatccgcagggagcttcaaaaccacggctgcaacgtcacgtgcgtccctgccggaacaaccgcgaaggaaattattgaaatgcaccccgacggcgtaatgctgtcgaacggccccggcgacccgcaggaaaacgcgccggttatcgagcagctgaaagagctgtgcaaagagaaaatcccgacctttggcatctgccttgggcaccagctcttagcactgtcgcagggggcggcgacggaaaagctcaaatacggccaccgcggggcaaaccagccggtaaccgacacacgcaccggccgggtatatattacaagccagaaccacggctatgcggtcgtaagcgaaagcctgccgcaaaacgcgagggaaagccataaaaacggcaacgacggcacttgtgagggcgtggaatatacggacatgcccgccttttccgtacagttccatccagaggcctgcggaggcccgctcgatacggccttcctgtttgacaggttcatcgagctgatggaacagggcgcgaaagcatgaagaggccctatcaaagcgtttgtataaggaaaggaatggtacacaatgcctttaaataaagacatcaaaagagtaatggtcatcggttccggcccgattgttatcggccaggcggcggagttcgactatgcgggcacacaggcgtgccgcgcgctcaaggaggaaggcttggaggttatcctcatcaactcaaaccccgcgacgattatgaccgacaacgccatggcggacaaaatttatattgagccgcttacgcttgaaacggtcaagcgcgtcatcgagaaggaaaagccggacagcctgctttccacgctcggcgggcagacggggcttacgctttccatgcagcttgcaaaggaagggttcctggaaaggaacaacgtaaagctattgggcgcggaccctgaaacaatcgacaaggcggaggaccgccagctgtttaaagataccatggaggcaatcggccagccggtcatcccctccaaggtagtaaacgacgtggaaagcgccgtggattttgcaaatgagattggctatccgctgattatccgcccggcgtttacgctcggcggcacaggcggcggcattgtggaaaatgaggaagagctgcgtgaaattacggcgaacggccttgcgttgtccccaattacgcaggtgctcgtcgagaaatgtatctccggctggaaggaaatcgagtttgaggtcatgcgcgattccatgggcaacgtcattaccgtatgttcaatggaaaacttcgacccggtcggcgtacatacgggcgacagcatcgtcatcgcgccgacggtcacgcttgccgacaaggagtaccagatgctcaggagcgcgtcgctcaacattatttccgcgctcggcgtagagggcggctgcaactgccagttcgcgctgcatcctgaaagcaatcagtacgcggtcatcgaggtaaaccccagggtgtcgcgctcttcggcgctcgcatcgaaggcgactggctacccgattgcaaaggtggcggcgaaaatcgccatcggatatacgctcaatgaaatcaaaaacgcggttacgggcacgacctacgcctgctttgagccggcgctcgactatgtggtcgtaaagctccccaaatggccgtttgataaattcgtctatgcgaagcgctcgctcggcacacagatgaaggcgaccggtgaggtcatggcaattgccccgaccttcgagcaggccatcatgaaggccgtgcgcggcgcggaaatttcgctcgataccctaaacagcgacaagtttgtgaacatgccggtggaaatgctcaggaacaggctcagggtatgcgacgacgaaaggcttttctgcgtgtaccaggcgttgaaaaagggaatcacagtcgatgaggtgcacagcgtcaccatgattgacgaatggttcttagagaagcttttgaagctcatcgatatggagagaaggctctcgcaggaggatttgagcgatgagttgtatatggaagccaagagcatgggcttccttgacagggtgattacaaaaataagcgggaaagaaataaaagcccccgcacgccctgtgtataaaatggtcgatacgtgcgccgcggagttctccgcgcagacgccttatttctattcgacctttgatgaggaaaacgaggcggaggaattcatagaggcaaacaaaacgggcaagaaaacgattatcgtttttggctccggcccaatccgcatcggccagggtattgagtttgactacgcgtccgtccactgtgtatgggcgctcaaggaagcgggctatgaggtcgttatcgtcaacaacaacccagaaaccgtttcgaccgacttcgacacggccgaccgcctttactttgagccgcttaccacagaagacgtcatgggtgtaatcggtacggagcacccgtacggtgtggtcgtggcgttcggcggccagacggcgattaagcttacaaagtacctgagcgaccatggcgtcaatatcctcggcacatccgccgacagtatagacaaggcggaggacagggagcgctttgacgagcttttggagaagcatcacatcatgcgcccgcagggctttaccgtcatgacgacggaggaagcgctcgacgtggcttcgaaaatcggttatccggttttaatgcgtccctcctacgtactcggcggccagaacatgattatcgcatataacgacgacgacattgtggaatacatgtctatcatcctttcccagaatattgaaaacccggtgctcatcgataaatacctgatgggtacggagcttgaggtcgacgccatctgcgacggcgaggatatcctgattcccggcatcatggagcatattgagcgcgcgggcgtccattcgggcgactctatcgctgtctaccccgcgtggaacatcaacgacgaaatgacgcagaagataattaaatcctcgcgcgacctggcgctatcgctcgatacgaagggcctcgtcaatatccaatacctgatttataatgacgacctgtatgtcattgaagtaaatccccgttcttccagaaccatcccttatatcagcaaggtcacgggcgtaccgatggtcgatttggctacgcgcgcaatgcttggtgaaaagttaaaggatatgggctacggcacagggctatttaaaaagtccccatacattgcggttaaggttcctgtcttctcgtttgaaaagctgattaacgtcgataaccacctgggcccggaaatgaaatcgaccggcgaggtcctgggaattgccgaaacgctcgaggaggcgctttacaaggggcttgtgggcgcgggctataaaatgaccaagtcgggcggcgtgctcattacggtgcgcaacagcgacaagggcgaaattggcgacgtcgccaagaaatacgcggagctcggctttaagatttacgcgaccaagggaacagctgacgtcctgaaggaatacggaattgacgcggaggttgtcggcaagatacacgaatcggccgacaatacgctgacgctcatcgaaagcggaaaggtaagctacgttatttccacctcctccaagggccgtatcccaacgcgcgacagtgtaaaaatccgcagaaagacggtcgagcgcaatataccgtgccttacttccatcgatacggcgaacgcccttgcgggctgcctgcgcagcaggtactccacgcgcaacacggaacttgtcgacatcaaccacatgagaagcgaaaagatgaagtacgagttcacgaagatgcagggctgcggcaacgactacatctatttcaactgcctgaaaaataccatcaccaacccggagggcctgagtgtgcgcctttccgacaggcgctacggtattggcggagacggcattattttaatctgcccgtctgaggcggcggacgcgaagatgcgtatgttcaacctggacggctctgagggcaggatgtgcggcaacggcgtgcgctgcattggaaagttcctttatgaccacgatttggtcgaccagaataaggataccgtttccattgagacgttaagcggcgtcaagacgctcaaggtctataagcaggacggtgaggtcaagaggcttcgcgtcgatatgggcaaggcggagcttaacccgaaatacatcccggttgcgatggacaaggaaaaaattatagacgagccggtacagattgacggcaaagaatacaacattacctgtgtttctatgggcaacccgcactgtgtcgtctttgttgataatatagacgggctggacattgaggatattgggccgaagttcgagcacgacaggctcttcccggagcgcgtcaacgcggaatttgtaaaggtgctcgacgcgcataccatccgcatgagggtgtgggaacgcggcagcggtgaaacatgggcctgcgggacaggcgcgtgcgccgtggctgtggccgccgttgagaacggctattgcccgatgaacgaggatattaccgtaaagctcaagggcggggatttggttatccgctacacgggcgacaccgtctatatgaccggcgaggccgagcgtgtatttgaagggacaatcgtcctgtaaagccagaatggcttagatatttggatttttccggcggaagcgctgcatttccgccggacgcgatattattttcatagggaacccatgcgcagaatgtaacgttctgcgtattgtggtttctcaggggacaggcaaggacaacaaaaaagtaatggaaaaggacgatgaggaatgacaaaatatatttttgtaacaggcggagtagtttctggtttgggaaaaggcataacggcggcgtctttaggcaggcttttaaaggctagggggcttaaggtcgcggcgcagaagctcgacccgtacatcaacgtagaccccggcacgatgagcccgtaccagcacggagaagtatatgttacggaggacggcgcggaaaccgacctcgacctcggccactacgagcgctttattgacgaaaacctgaacaaatactccaacctcaccacaggcaaggtgtattcaaacgtccttgacaaggagagaaggggagagtatcttgggcagaccgtccaggtcatccctcatattacgaacgaaatcaagaactttatctacagcgtcggcaaaaagtcgaacgcggacgtcgtcattacagagattggcggtacggtcggcgatatagaaagccagccgtttttggaggcaatccgccaggtgtccctggaggttggcccgaccaactgcatttttgtgcatgtaacgcttgtcccgtacatcaagagctccggcgagcataagtcgaagcccacgcagcacagcgtcaaggagctgcgctcgctcggcatcaatccggatatcatcgtgctgcgctgcgatgagccgattgacgagggcatttttaagaagattgcgctgttctgcaacgtaaagcctgactgcgttatcgagaatatcacgctgccagtgctctaccaggcaccgctgatgcttgaaaggaataatttttccgatattgtgtgccgtgagctttgcattgaaaacaagcccggcgatatgacagaatggctcgaaatgctcaagcgtatcgaatcgaggaataaaaacgtcaagattgcgctcgtcggcaagtatgtacagctgcacgacgcgtatctgtccgttgcggaagcgctcaatcatgcgggctatgaaaacgccgcgaacgtggacatcgaatgggtggacgcggagcttgtgaccgaatataccgcgaaggagcttcttggaggctgcagcggtatccttgtgcccggcggctttggcgacaggggcatcgagggcaagatagaggcggcaaaatacgcgagggaaaacaatatcccgtatcttggcatctgccttggcatgcagacggcggttatagagttcggcaggaacgtgctcggctacgaggacgcgaattccggcgagttcgcgccggaatcggaaaacagggtcatcgacctgatgcccgaccagcagggaatcgtctcgaagggcggtaccatgcgtttgggcgcgtacccgtgcaaaatcagggaaggctctatcatgtcgaaggcttacggcaagaatgagattgcagagcgccaccgccaccgctacgagttcaacaacgattaccgtgaggaattcgagtcccgcggtatgctcgtgacgggaacgtcccccaacggcatgctcgttgaggccgtcgaaataccggataaccgtttttatgtcggcgtacaataccatccggaattcaagagccgcccgaactttgcccacccgctgttcagggaatttgtaaaggcttcgcttgagcatcaggggtaacaggcaggcttatcaaacaggggtttgtgcgaaccgcaagcgaacataaaaatacagggaggttcgcaccataatttctgttacataactgtgtaatgggcgataagtgcgaccttgttttattccaaacagaagctatatgctttgattttgtgtaaaatgcataatctgaaaatgcttttttgtgttgttttactgtcgccgctcatccgggcggcgtggattgaaatggctcggctcgttatcgacaaaacgaccgcaaacagtcgccgctcatccgggcggcgtggattgaaatatggagaatataggaaagataaacaaggcaacagcgtcgccgctcactcaggcggcgtggattgaaattcggcaccggggtatggattgcgagcttggcgatgtcgccgctcactcaggcggcgtggataaagaataataaccggtccgtgcaggatgggaatagggagggagcaaaatgtggttctgggtctttatgctggtggtaaaccttttgcttcctttttccatgctcggcttcggcagccttttttataaaaaaccgccggataaaatcaacagcgcctttggctaccgcaccaaattgtcgatgaaaaatcaggaaagctgggaatttgcacaccgtacctgcggcaggctttggcgtgtgctcggccttgtactactcataataaccgttattgccatgctgtttttactcggcaggaatatggaaagcaccgcgttcttcgcgacaggcatccttgtttttcagcttctcgtcatgcttggctccatcttaccggtcgaacgcgcgcttaaaaagcgctttaacaaggatggcaggcgcagataatagagctttcttatcattgaatcgaaattttcagcccggaaacgggcatcttatattcataacccgattcaggaaaggatgattttacatgaaaatcaacacgaattatcaaaacgtacagaacagctaccttttttcgacgattgcaaaaaaggtaaacgaatttggggaagcccatcccgataaaaagcttatccgcctgggaataggcgatgtaactaagcccttgtgcccggcggttattaccgcgctgcacggcgcggtcgatgaaatggcggacgctgctaccttccgcggctacggcccggagcagggctacgacttcctgcgtacacagctcaaagcttactatatgctgcacgacgttgagcttgagcagggtgagattttcgtgagtgacggcgcgaagagcgacgtcggcaacatcctggatttgtttgacacggacaataccgtactggtgcccgacccggtctaccccgtatatgtagatacgaacaccatggcgggcaggaagattgtctacatggacgcgacggctgaaaacggttttttgccccttccggacgaaaccgtaaaagcggacatcatctacctgtgctcgccgaacaacccaaccggcgcggtctatagccgggagcagctgaaaaaatgggttgactacgcaaacgcaaacgatgcggttatcttgttcgacgccgcatatgaagcctttatttccgaccccacgcttcccaagagcatataccagattgaaggcgcgaaaacgtgcgccatcgagttctgctcgttctccaaaacagcgggctttaccggtacgcgctgcggctataccatcgtcccgtttgcgcttgagcgccaggggatggggctcaataaaatgtggctgcgccgccagacgacaaagttcaacggtgtgccttatatcgtccagaagggcgctgccgccgtctttacggaggaagggcagaagcaggtgaaagaaacgataggctattatatggagaacgccgccatcattgccagggccttcgacgagcttggcgtgtggtatacaggcggcaaaaattcgccgtatatctggcttaagtgccccggcggcatgaaatcgtggaaatattttgattacctgcttgaaaacgcgaacgtggtcggcacgcccggcgcgggctttggggaaaacggcgaaggctttttccgactgaccgcgtttggcggccgtgaaaatacaatagaagcggtcaggagaatcaagagcttgaaataaaacagcttgatatccagcggatgtggcagccctgcttttgcgggatgctgattgaggggcgggcggcattgtcccgccccgtttgctgtctgtacagagagagggacctatggcttttttacccgtaacgaaaaaagaaatggaacaaagcggctgggacacgccggattttgtgtttgtcactggcgacgcgtacgttgaccacccgagcttcggcgtgagtatcctgtcgcgcgtgctggaggcgaagggataccgcgtctgcgtccttgcgcagcccgactggaaaaacgagcgcgattttacgcgcttcggaaggccgaggctcggctttctcgttacgtccggcaatatcgacagcatggtcgcgcactacacggcggcaaagcgcaggcgcagtgacgatatgtattcacccggaggcaaggcgggcaaacggcccgaccgcgcggtgattgtctattccaaaatcatcaaacggctttacccggactgccccgtcattatcggcgggctggaagcgtccctgcgccgttttgcccattatgattactgggacgacaatgtccggccttctgttttaatcgacagcggcgcggatattttgacctacggcatgggggaaaaccagacgcttgaaatcgcccgccgtttaaacgatgggcttcccgtttcgtcgcttacggacatcagggggatttgctacgcggtcgatacgaaggattacgctgcaatgcccgccgccgactgcccgtcatatgagagggtaagggaatctaaaagagagtacgcggcggcctgccgcaagcagatggaagagcaggacgcggtgcgcgggcgtacggtcatccagcgccatggcgggaaaatagtagtgcagaacccgccgatgccgccgcttacgacggaggaactcgactgggtttattcgcttccgtacgagaggatgttccatccggtgtatgaaagcatgggtggtgtgccgggaatagaagaggttgaattttccatcacgcataaccgcgggtgcttcggcgcgtgcaacttctgctcgattgcgttccaccagggcagggccgtcaccgtaagaagcgaggagtcagtgctggaggaggcaaaacgcctgacggaaaacccgcgctttaaaggatatatccacgacgtaggcggcccaaccgcgaattttcgcctgccgtcgtgtaaaatacaggaaaaggcggggctttgtaaaaacaggaaatgccttgccccaaagccgtgcaggcagcttcaggtatcacacacggaatatttaggccttctgcgcaagctgcgcgccctgccgaaggtaaaaaaggtatttatccgcagcggcatacggttcgattacatgatggaggacgaaaacagcgagttcttccgtgagctggtaagctgccacataagcgggcagctgaaggttgcgccggagcattgctcggcggccgtgctcgacaaaatgggcaagccgcatatcgaagcctacaagcgttttcaggatgagttttaccgtatgacgaaacaggccggaaaggaacagtaccttgtaccttacctgatgtcctcccatcccggctcgacgatgaaggacgcggtggagcttgcgctgtttttaaaacgcgagcatatccgtcctgaacaggtacaggatttttatccgacacccggcacggtttcgacctgtatgttttacacggggctcgacccgtatacgatggaggaggtttatgtacctcgcacgcagaaggaaaagtcgcagcagcgcgcgctgctgcaatatttcaacccaaaaaacaggcagcttgtcatcgatgcgctcaaagcggcgggcaggacggatttaatcggcagcgggaaaaactgcctggccgctcccacgccgcagtatttggcggaactgaaagcacgcggtaccggaaaaggaaaaagccgcccaaacagcaaaaaggcggggaatagaagcgcgggcggaaagcggggaaggggcagatgaccaccaggcgaatgaaaaagcggttcgcggctctttcctgcacggccgtactgctcgctataagtctcctgttttcctttggaaagccgctcggactcccctcatggcaggatatttacgccgccttcggctttacggacgtaaacccggaatcaggggagctgtccgtgcattttttgaatgtcggctgtgcggacagcgtatatatcaactgcggggattacaatgtattaatcgacgcgggcaacgagagcctgcaaaacaagtccgcagcctacctgcgggaaaacggcgtcaaaaagctcgaccttgttatcgcgacgcatcccgacaaagaccacatcggcgggatgcaggaagtggccgggacattcccggttgaacggttctggataccgcaggtgaaggaaaagcttgtaccggactccggcttttacaccggtatgctctggaacttggaaaaacaggaaacggaaattacccatccgtgggcgggagaatacctgcggctcggcgatatggtgtttaccgtgctgtcgccgtccaaaatctacagcgatacaaataatagttccattgtggtaaggctgagctttggcaagaacagcttcctgtttaccggcgacgcggagaaaaaagcggaaagcgacatgctgaaaagcggcatgggcttaaagtccgacgttttaaaggtcgggcaccatggaagcaaaagctcctccaccaaggattttttaaaggcggtttccccgcggtacgcggtgataagcgttggggacaacagctatggccttcccaaaaaaacagtaatcaaacggcttgaaaagctcgggacagaggtttatcgtactgaccggtacggtaccgtcgtattttacagcgacggcgagcggctcaccatacatacgcaaaggagttaagatgatgaaaaccttgaaaatcgaccggttcgacccacagtacgccatctgcaccgacaaagagaagaagctttacgcgattgagctttctgagcttcccaagaacgcaaagcagggggatattcttttgattcaagacgacggcgtcattacaatcaggaaatgaatgtaagattgttcgcgcattccttgacaaatcgcaccgcgtttactatactagaccacaaaggcatggaagggaagaagtaagcagacaggggcgctaaagagaggcggcgtaaggtgcgagccgctgtgcccggctgttgaaatacatcccggagccgccggctgaacgggcgcttgcgcgcttttattaggcccggacgggtttcgcccgttacagcggaggggtatgcgtttgcgtacccgtgaggctgtcgccgtgaggcggcggtaaactgaggtggtaccacggaatattccgtcctctggattttgcaggggacggttttctttatgatgcgccggcttctgccgtattttaagctttgaaaagcgaaaaacaggaggaatttcaaatgggcgtatacgacgaactaaaagcaaggggcatggttgcccaggtaacgaacgaggaacaggtaaaagacctgctcaataatcagaaaacagcgttttatatcggcttcgacccgacggccgacagcctgcatgtcgggcatttcgtgcagattatggtcatggcgcacatgcagcgcgcgggacatacgccgattgcgctgttcggcggcggtacaggtatgatcggggacccgagcggcaagagcgacatgcgcaggatgcttacaagggaagaaatcgaccataacatcgcctgctttaaaaagcagatgtcgcggctggtcgatttttctgagggcaaggcgctaatggtcaacaatgccgactggctgctcgatttgaactatatcgatttcatccgcacgatcggcgtgcatttcccggtcagcaaaatgcttgcggccgaatgctacaagcagcgcatggagcgcggcggcctgactttctttgagctcaactacatgctgatgcaaagctacgatttctatgtccttaaccaaaaatacggctgccagctcgagcttggcggagacgaccagtggagcaatatcatcggcggcgtagagctgattcgtaaaatcgccgccaaggaagcggaggaaacgggcaaacccattcccaaaacggcggagtccttcggcatgacgtttacgctccttacaacgagcgagggcaaaaagatgggcaagacggaaaacggcgccgtgtggctcgacccggagaagacgagcccgtacgagttttaccagtactggcgcaatgttgccgacgcggacgttatccgctgcctgaaaatcctgacctttgtaccgctcgacgtaatcgaggcgctttccaagctggagggcagcgacattaacagggcaaaagaggttctggcgtttgaggtgacgaagcttatccatggggaggaagaggcacagaaagcccaggatgcggcgcgcgcgctgtttggcgctggaaagagcgcacaggacatgccctccactgcaatcgatgagaacgactttacagacggtacggtaacggtaatcgacctgcttttgaaaacaaagcttaccccctccaaaagcgaggcgcgcaggcttatcatgcagggcggcgttacggttgacgatatgaaggtgacaaagccggacgaaacggtcgcaaaggcgcagtttgaggaaaagggctatattgtcatcaaaaagggcaagaaggcgttccataaggtgagcctttaagacctgacaggaaggggagcgggcatatgaggaaatttttctcggaattcaaggaatttattatgcgcggcaatgtgatggaccttgcggtcgcggtgattatcggcgcggcgttccaggcgattatcagttccctggtaaacgacgtgatttctccgtttatcggattgtttgccaagattgattttaaagactgggtttttgacatcaacggcgtgcagattcaatacggctcatttttgacggcgcttatcaactttatcatcatggcgtttgttattttccttttaatcaagggaatcaacaaggttatgagcattggaaagaggctcaggaaggaagaggagctgctctcagagccggaaacaaaggcatgcccttattgcctgacggaaatcgatatcagggcgacgcgctgtccgcactgcacttcacagcttggggatgcggaagaagagaaataatttgatgcggttacgtccataatatagaaaacggcatcggagcattttggtttgatgctgcgcttcggcggaaaaggagaaaacggtatggctcaaaacaagggaatcctgcataaaatcaaagagacgttcgaccaacgatctattattgtggcgtccgcatttattatttttatcgcgctgctcgttatcatggtaacgtttgcggtcaatgtggggccggcgatagcggcgcgtgaggcgggggcgaatgcctccgcgggaaccgtttcttctgagagcgggaacaaggcgtctgcgggagcctccggcgcggacaagcttccaagcggctttaccacggtttccgttgcgcgggaaagcctgtataaaggcccgctgattcttgtgaacaacgaccataaatgcggaatcgacggggtaaacctcgtcggtatgatggaggaatacaacaaaacgttcaaggtggcggattacgacgtccaggtaaacggcgcgattatggagaacattaattccatgttcggcgattttcacggccagtacggagacaacgacctgcttgtaaacagtgcctaccgcagccaggacgtccagcagaccatttatgacaatacgcttgcttccaagggtgaggaagggacgcagtgggtcgcaaagccgggctacagcgagcaccagacgggctacgcttttgacctttccctgatggcgccggacggtacaatgtacgattacgacggaacgggcgactacggctggattaatgaaaattgttcccgctatggctttgtcgtgcggtacgacgacaagaaaaaggaaattacggggattgcaaacgagccctggcatttccgctatgttggccagcagcacgcaatctatatggttcagaacgacctctgccttgaggaatatatcgatttactcagagactattccgcacaggagccgctcctgctcaaggacctttcaatgaatgaatacaaggtttattttgtgaaggcgcaggagtccggcagtaccgaggtgcctgtcccgcaggacggcgaatatgaaatatcgggcaacaacgtcgacggatatatcgtcacatggaaactataaactgaaaagcaaagcaggctgcgtccgggacgcagcctgcttttttcttcctgttactggatttcttcgattgccccgtgttcctcttcataatttttgatggcttcttcaataaaagaaaggatttcgtggtttaccgtttgtttttcgcggtatgacataaccttcagcttaaaaagcatgttgctgtcaatcgtaattcttaaatctttgttcggcatgctggtttcctcctgttaaagatatgaaagctatgaaaacattatatgtcgagcataaaacagtgtcaatacggctgaaaataggcataaaacaaatttataataaaaaacaaccatatgcggtttatatctcttattatcaattgaatagcattgggatattgcaaaggaattcataaaaaatataataaaaaaatttttttgcttttattttgcggaaaaagaaacaattttattcattgacagccatatatggtttatttataatagaattgaaccatatacggttgatattaagaaaatagttttttaaggctccatctttataagagaaagcggtgttttttatgattcaaaacaggctgaaggaactccggagggcgcgcggaaagacgcagctccaaattgcgcaggtgctgggtacgacctaccaatattacagtacttacgaaaaggggcagcgcgacctgccgcttgaacgggcaaaaaagctcgcggtttattataatgtttcgcttgactacctttctggattatcaggccaggcggaaaaatgctggctggaataacaggaaaaaataaagacgggcgcaggcagaattttctgcctgcgcccgtttattgaaaaattacttaaaatttgattttttcgttgacataatctacaagcttatcgattgcaattctatcctgcgccatcgtgtcacggtcgcgcacggttacgcagccgtcctccacgctgtcgaaatcgtaggtgatgcaaatcggcgtaccgatttcatcctgcctgcggtaacgcttgccgatagagcccgcgtcgtcgtattccaccataaagtgcttttgaagcacctcgaaaacttcgcctgcctgctcggagagctttttggacagagggagcaccgccgccttgtagggagcgagcgccggatgcaggcgcatgacgacgcgcgtgtccttttcgtcaatagcttcttcgtcgtatgcgtcgcacaggaaagcgagcgcaaccctgtcagcaccgagtgacggctctataacatagggaacatagcgggtattgtctgtcgggtcaaagtattccaggctcttgcccgaatggttctggtgctgcatcaggtcgtagtccgtacggtcggctatgccccaaagctcgccccagccaaatgggaagaggaactcaatatcggtcgtcgccttggaatagaaggcaagctcttccttttcatggtcgcgcaggcgcaggttttctttttttaggcccagcgacagcagccagttttcgcagaaatccttccagtaatagaaccagtcgaggtcgctgccgggcttgcagaaaaattcaagctccatctgctcgaattcccttgtacggaacacaaagttcccgggcgtaatttcgttgcggaacgatttgcctatctgcgccacgccgaatggcatcttacggcgggtggtgcgctggatatttgcaaagttgacaaatatgccctgcgccgtttcaggccggaggtaaatttcgttctttgcgtcctccgtaacgccctggaacgttttgaacatcagattgaatttgcggatatctgtaaaattgctgccgccgcattcggggcaggcaatgttattttccttaataaaatccgccatttgttcaaaggtcatattgttcgggtccgcgccgaaatcctcaatgagcttgtcggccctgtggcgcgttttacagtccttgcagtccatcaaagggtctgaaaagccccctacatggccggaagcgacccaaacctgcgggttcatcaggatagcgcagtcgagccccacgttataccggctttcctgtacaaactttttgtgccaggctcttttaacgttgttcttgaattcaacgcccagcgggccgtaatcccatgtgttggaaaggccgccgtaaatttcggagccggaataaacgtatccccgggtcttgcacagggaaacgattttttccattgtttttttactgttatccatgttggaaggttcctttcaatagaaaagtgttaagtaaatatcctatcctatattaatgtttcagagcgtatatgtcaagataaaccaacaggatagggcgtgttctaatgccatagggcgtaattgggcaggatgggaatatttaacttccaatattttttcttgttgatttattacaaatcttgaaaggctttttcggttgtgttttataatgaaattttaggatattgaaactccatttgatttaccttaaattttgacaacaaaatggataaatagtgacattgacaaaaagtgggggtattgtatcataggattagcatgaaatattatagctgaatatcctgtggaatattgttcttttttgtgccaaatagcaaaattttacatataaaagaacatttcatagagcttccgctatatgttttgcgttgtgtcagataccaattgcagtcgcgtcggcttcctttttttcctgtgtttagatgcgcaagccgccgttttgatgaaacggtcttaacatagtgaaaagaccggcgcgaaatttttttggtttggtggaagaaagccagtcgggctttcgcagcgctcccgctttgggagagggcaaaaaacaacaagggggactgccggggtaatcaagatggaacgccttaaaaggcgcaggctgatgcggtgcctgccaaaaccgtaaatttatatgaaaaaggatatcagtgagatgtatagaaagagagtaaagctgctttcattgttcttatcgctgctgatggttttcggagcggtggcaaatgtcacggcggccggagcaggcagcgcgcaggaaggtatgcagaccgtctactttaaagacacgaactgctggcaggggaaatttgcagacggtatctatgcctacctgttcagctcggcaggctctgaaaacaacggctatccgggacaggcgatgacctatctcggcagggacgcagagcaaaacaggatttattccatcgaggtggataccacgaaatacgatacgattaaattcacaaacggagcgcagagcggcaccgtaaaccgcacggataattatcccgtcgctttgacgagtgacaataacggctacggttttacgggcaacatgacctccggcaacaaatattttgaggtcgcgcagtgcaaggcgcagacagaggggctggatataactgagccgtctgaaccgacgaatccctctgagcctacgaaccctgacctgccggacacgctcactatttattttaaggacaccaactgctggggcgacggttttgtaaatggtatttacgcctacctgttcagctccaccggctcagataataacgtttatcccggcgtaaaaatgcagtttatcggcagggatgtcgaaaagaacaaggtctattccgtcgatgttgacactacaaaatacgacaccattaaattttccgacggcagcgcttccaacaggcgcacgaataattttcccgttgcgctgtcggcgggcaacaacggctatcagttcaacggcttgatggaccctgacgactcccggtattacggaatcgagcaggcgaatatcaataccgataacctgattgtccgcgatgaagaagacgtcaccgtttattttgccgataccgcggcatggggccttccgtacgcatatgtcctgtcggcggacgacagccagacaaacggcgattacccgggcgagcccatgacctatgagggcaaggacgcacagggcgtggatatttattcctatacgtttaatttctttgattttgcaaaaatcaagttttctaatggcaagagcgcttcttcctcagaccacaagcgcacaggcaacctggaataccgcacacagcttacaggcgaattaaacgcttaccgcctgacgggcagcgcggacccagctaagccgagcaatctggaagccgaggcctgcacggtcgatataaaggcgctcgataaatctgatttgacgaccatttatttccgcgacgaccttcagtgggaggaaatttacgcctacaccttcagcagcgcggacggcaatacctccaacggcccgtatcccggccagaggatggaatacgcaggtaaggacaaggcgggcgcgaaatattattcctataccttcccgtctaaaacgtatgacaccatcaaattctcggacggaaccacggaaaacaggcgcacagacaacattctgtacgcggcagacgcgcaaaacggcagcaactgctattacctgaccgggtcgtcctccggcggaaagtatgaatttaagcctattcaggtagaccctgccgggcttgacgctacggaaatgttcacggtttattacaaggatacgattggctggggcgacccgtacctttatgcgttttcaagtacaggggcaggcgatgacaaggcttatcccggtacgcgcatgacgcttgagggaaccgttggaaagactaagatttattcctgcgcgttcgattccaacaaatacgaccgcataaaaatcgatgatggaacgatacttggctgttctgtcccaaacaggcgtacggcggatatcgactttatcaaggacttaggtgagaataactgctttgagctgaccggaagcacgacagtgaccggcggcaaggagtattacgattataaggcagtctccgttaatacggacgaaattacaccttatgagggcgttaaaaccgatacaaaggtcaagaacgtcatctttatgataggcgacggcttcggtgaaaagcaggcgcaggccggcgagctctacaaaggcggcaagcttgtgttccgcacaggcgaggaaaacggctggtaccgcaattggcagacgacgcatgacgcggactaccccaaatttacggacagcgcggccgccgcgtcggcgcttgccaccggcgttaaggtacacgacagcgtggtcggtatttccccagagggcaaatgggtggaaaacctgaccgagttttctaaagcgagaggcctcaagactggcatcgtcgtcacacaggtgcttccgcacgcaacgcccgcgggctttacggcgcatgtcgattccaggcattcctacgacgaaattgcgacgcagcagattaagcagaacatcgacctcatgttcggcggcggttcgacctacttcaacgcaaggaagagcctgatgaacgacctcggttattcatataccacgaatttctccgacgtatcaaacgtgcctgctgaccagaagctcatcggcgcgttcaaggattcctatatcaagcattccgactcgaaccttccgatgctggccgataccaccaaggcggcgcttgaacgcctgacgaacgacgacggcttctttgtcatgatagagggttccgatatcgacgcgtacgcgcataacagcaacatggcggatatgctcgatgaaatcatcgtattcgacaacgcggtaaaggtggcgcaggaatacgttgacgcgcatcccgacacgctcctgattgttacggccgaccatgaaacaggcgggctggacctcagcggcgtaacagacaaatcccagctgacgaacagcctctttaagtccggcggtacgcatacgggacaatccgttccggtttatgcttacggcaagggcgcgcaggagcttacacaatataatacgatagacaacacggaaatccaccagtttgttacagacgtgctcaacaacgagtacgacccgaacggcgaaatcggcgagaacgtcttaagcgacgcgaacaacgtgatttacttccagaagcctgccgattgggaagacgtttatatttacagcgacgcttacaaatccacaaaggaattccccggcgcgccgatgattctcctcgagggcgacatttacacctatacgattccttacgacgtcaagaacctgtccttcagcttcaatgacggaaacaagaagtctacggtaacggtggagaacccgcagtacaacaagctttactacatcgatgacgataaggacccgcagaaatccaccgtctcggtcaacgaggaatatgctccgccggagggcgttgtatactttgagaagccagacgactggaaggacgcgtacatctatacatggggcagccgctacggcgggacatggcccggaacacagatgacgcatgttgagggcaacctctacaaatatgtgctctatggctctacgacgattgcttccgcattcggcctgattttcaacgaagggcctgtatccggtacagccaagcagacggtggacctggaattcatgggcttcaacctgctttataagctaaccggtgaaaaggatgcccagggccatttctacacctcgtttgagaaatatcccaagcaggcggacgacggcgaggatgccggtacgttctacttcaagaagcctgccacctgggatgcggccaatgtttatgcgttcttcggcgcgtatgtcggcgaatggtccggcgtgccgatgactaaggtaacagacgacatttattcctttaccttgaagaagggccaaatgttcagcggcggccataatttcaagcttgcgttcaacgacggcaagacttaccagactatcgacgttgcgttcgagggcttcgaccgtatttataccatagaaggcgacgatacaaccgaggctgcatacggctcctggagcaagtatacaccggcacaaatcaagtacggcgacttaaacggcgacggatttgtcaatgtggccgacgtcctgattgtccagcagtatctcgcacgtatgattgagctgaccgacgcgcagaagatagcggctgacgtcgatttgagcggagacatcaaggtagccgacgttctcgaaatgcagaagctcattgcaaaaattatcgataagcttccggcggaaagagtccggtaaaaccacaatctgatttgccgaatcttgcggcataaacggctttcaactgtgcaatccatatgaataatttgatacctccaaatatcaaccgcagccgttttatgcacaatgtattctatatagtaggaccgcaggggaaaacctctgcggttttacttttcgtatggcagaatctctaaaaaaacaagacaaactttgtttgtttttcaagcaaaaaaggctgtcaatttgcatctttttgtttgctttttttttggaaaaacagtataattataacaatttggggcgattcgtcccaaacgccggatttccgtattttaatggtaggtacgggtatgctccggaaaaaaatttttaggatattcttgaaatgaaaggatgaaacaaatggtcaaaacaattgaaaagtgcaccgcgtgggtgcttgccgcggcaattttgctgagtatggcatgcatcggcgtgtatgcacagcgcgcaccgttccgttacggagacgtaaacggggacggtaaggtttctgcggccgatgcgatggaggtttccaagcataccgcaaaaatcattactctgacaggcgacgcattcaaggcggcggatgtcaacggagatgggatagtaagcgtaaaagacgcgattctcatccagcaatatgtcgcaaaggtaatcgatgtattcccggtggagctcatccagccgactgacccgacggttcagccgaccgagcttcccaccaccacccctaccgaagctcccacgattaagccgaccgacccggagcgctatgatacgcttgttaatggtaaaaaagccaatgtcggtgatgaaatcgtttacactgcatatctctatgcgaaggaccttgtagccggcgtaaacgcttatgtaaattataccggtgatgttttaaagatttcagatatcacactgggttctaaaaagaaagctgtcctgccaattttggcaaatggcagcagtgttttgaattttaacccggttgacggctctgattcgatttatttcaatggtgccaacgcggatgaaggctatgatttctccgcaaaggaaagtattcttgtaaccgtgcgttttgatgtaattaaagaaggaaccgcttcaattggaacgtcaatgacacaaattctttcgatggagctcgattcctcgaacaagaaccagccgcttgaggattatacccttacggataaaactgaggtaataggcggtacggttgacccgaccgaggctcccacacaggccccgaccgacaagccgactgaagcaccgaccgcggcgcctacagataagcccacggccgcgccgaccgatccgaccgaggcgccaacccagaagccgaccgaggcgccaactgtggcgcccacagaagtgcctacagagaaacccacccaggtgccgacagagcagccgaccacgccgccttccggcgacgcggtaatcaacggtcagaaagcaaacatcggcgaccatgtaacgtatacggcttacctgaaggcggatgaactcgtagcgggcgtgaacgcgcacgtgacgtacacgggcggcgtactcaagctttcacaggcgacgctcgactccaaaaaggcacaggttatcccggtgcttgccacaggcagctccgtgcttaatttcgacccggtggacggtacaaattccgtttacttcaacggtgcgaactccgacgagggctatgagttcttcgcggaaaagaccgtgcttgtcaccctgacatttgacgttatcggcgcgggaacagcggagataaaaacggcaattgcgcagattctttcaatgcagctcgattcctcgaacaagaaccagccgctcaaggactataccctgactgacgaaacgaaggttatcaagggaaccacagacccgaccgagccgaccgaagctccgactgtggcgcctacagaagcgccgacagagaaacccacccagaagccgacagagcagccgactacgccttcttccggcgacgcggtaatcaacggtcagaaagcaaacatcggcgaccatgtaacgtatacggcttacctgaaggcggatgaactcgtagcgggcgtgaacgcgcacgtgacgtacacgggcggcgtactcaagctttcacaggcgacgctcgactccaaaaaggcacaggttatcccggtgcttgccacaggcagctccgtgcttaatttcgacccggtggacggtacaaattccgtttacttcaacggtgcgaactccgacgagggctatgagttcttcgcggaaaagaccgtgcttgtcaccctgacatttgacgttatcggcgcgggaacagcggagataaaaacggcaattgcgcagattctttcaatgcagctcgattcctcgaacaagaaccagccgctcaaggactataccctgactgacgaaacgaaggtcatcaagggaaccacagacccgaccgagccgaccgaagctccgactgtggcgcccacagaagctcctacagagaaacccacccaggcgccgacagagcagccgaccacgccgccttccggcgacgcggtaatcaacggtcagaaagcaagcatcggcgaccaggtaacgtatacggcttacctgaaggcggatgagctcgtagcgggcgtgaacgcgcacgtgacgtacacgggcggcgtactcaagctttcacaggagacgctcgactccaaaaaggcacaggttatcccggtgcttgccacaggcagttcggtgcttaatttcgacccggtggacggcacaagctccgtttatttcaacggtgcgaactccgacgagggctatgagttcttcgcggaaaagaccgtgcttgtcaccctgacgtttgacgttatcggcgcgggaacggcggagataaaaacggcaatcgcacagattctttcaatgcagctcgattcctcgaacaagaaccagccgctcaaggactatactctgactgataaaactgaggtaataggcggtacagttgatccgaccgagccgaccgaggcgccaacccagaaacctaccgaagctccgactgtggcgcccacagaagcgcctacagagaaacccacccagaagccgacagagcagccgaccacgccttcttccggcgacgcggtaatcaacggtcagaaagcaaacatcggcgaccaggtaacgtatacggcttacctgaaggcggatgagctcgtagcgggcgtgaacgcgcacgtgacgtacacgggcggcgtactcaagctttcacaggcgacgctcgactccaaaaaggcacaggttatcccggtgctcgcgacaggcagctccgtgcttaatttcgacccggtggacggcacaagctcggtttacttcaacggtgcgaattccgacgagggctatgagttcttcgcggaaaagaccgtgcttgtcaccctgacgtttgacgttatcggcgcgggaacagcggagataaaaacggcaatcgcgcagattctttcaatgcagctcgattcctcgaacaagaaccagccgctcaaggactatactctgactgataaaactgaggtaataggcggtacagttgatccgaccgagccgaccgaggcgccaacccagaaacctaccgaagctccgactgtggcgcccacagaagcgcctacagagaaacccacccagaagccgacagagcagccgaccacgccttcttccggcgacgcggtaatcaacggtcagaaagcaaacatcggcgaccaggtaacgtatacggcttacctgaaggcggatgagctcgtagcgggcgtgaacgcgcacgtgacgtacacgggcggcgtactcaagctttcacaggcgacgctcgactccaaaaaggcacaggttatcccggtgctcgcgacaggcagctccgtgcttaatttcgacccggtggacggcacaagctcggtttacttcaacggtgcgaattccgacgagggctatgagttcttcgcggaaaagaccgtgcttgtcaccctgacgtttgacgttatcggcgcgggaacagcggagataaaaacggcaatcgcgcagattctttcaatgcagctcgattcctcgaacaagaaccagccgctcaaggactatactctgactgataaaactgaggtaataggcggtacagttgatccgaccgagccgaccgaggcgccaacccagaaacctaccgaagctccgactgtggcgcccacagaagcgcctacagagaaacccacccagaagccgacagagcagccgaccacgccttcttccggcgacgcggtaatcaacggtcagaaagcaagcatcggcgaccaggtaacgtatacggcttacctgaaggcggatgagctcgtagcgggcgtgaacgcgcacgtgacgtacacgggcggcgtactcaagctttcacaggagacgctcgactccaaaaaggcacaggttatcccggtgcttgccacaggcagttcggtgcttaatttcgacccggtggacggcacaagctccgtttatttcaacggtgcgaactccgacgagggctatgagttcttcgcggaaaagaccgtgcttgtcaccctgacgtttgacgttatcggcgcgggaacggcggagataaaaacggcaatcgcacagattctttcaatgcagctcgattcctcgaacaagaaccagccgctcaaggactataccctgactgacgaaacgaaggttatcaagggaaccacagacccgaccgagccgaccgaagctccgactgtggcgcctacagaagcgccgacagagaaacccacccagaagccgacagagcagccgactacgccttcttccggcgacgcggtaatcaacggtcagaaagcaaacatcggcgaccaggtaacgtatacggcttacctgaaggcggatgaactcgtagcgggcgtgaacgcgcacgtgacgtacacgggcggcgtactcaagctttcacaggcgacgctcgactccaaaaaggcacaggttatcccggtgcttgccacaggcagctccgtgcttaatttcgacccggtggacggtacaaattccgtttacttcaacggtgcgaactccgacgagggctatgagttcttcgcggaaaagaccgtgcttgtcaccctgacatttgacgttatcggcgcgggaacagcggagataaaaacggcaattgcgcagattctttcaatgcagctcgattcctcgaacaagaaccagccgctcaaggactataccctgactgacgaaacgaaggtcatcaagggaaccacagacccgaccgagccgaccgaagctccgactgtggcgcccacagaagctcctacagagaaacccacccaggcgccgacagagcagccgaccacgccgccttccggcgacgcggtaatcaacggtcagaaagcaagcatcggcgaccaggtaacgtatacggcttacctgaaggcggatgagctcgtagcgggcgtgaacgcgcacgtgacgtacacgggcggcgtactcaagctttcacaggcgacgctcgactccaaaaaggcacaggttatcccggtgctcgcgacaggcagctccgtgcttaatttcgacccggtggacggcacaagctcggtttacttcaacggtgcgaattccgacgagggctatgagttcttcgcggaaaagaccgtgcttgtcaccctgacgtttgacgttatcggcgcgggaacagcggagataaaaacggcaatcgcgcagattctttcaatgcagctcgattcctcgaacaagaaccagccgctcaaggactatactctgactgataaaactgaggtaataggcggtacagttgatccgaccgagccgaccgaggcgccaacccagaaacctaccgaagctccgactgtggcgcccacagaagcgcctacagagaaacccacccagaagccgacagagcagccgaccacgccttcttccggcgacgcggtaatcaacggtcagaaagcaaacatcggcgaccaggtaacgtatacggcttacctgaaggcggatgagctcgtagcgggcgtgaacgcgcacgtgacgtacacgggcggcgtactcaagctttcacaggcgacgctcgactccaaaaaggcacaggttatcccggtgctcgcgacaggcagttcggtgcttaatttcgacccggtggacggcacaaattccgtttacttcaacggtgcgaattccgacgagggctatgagttcttcgcggagaaaaccgtactcgtcaccctgacgtttgacgttatcggcgcgggaacagcggagataaaaacggcaatcgcgcagattctttcgatggagcttgattcctcgaacaagaaccagccgctcaaggactataccctgaccggcgaaacgaaggtcatcaagggaaccacggacccggctagcgacgcggttatcaacggcgttactgcaaatatcggcgaccaggtgacctacacggcatatatcagcgccagcgaggcggctgccggaatcattgcgtatgttccttataatgacagcgtgctgaagctttccaacgaaacgctgacatccaaaaaaaatcaagtcatccccgcttttgcgacgggcagctctgtattgaattttaccccggttgacggttccagcgcggtttactttaattcggcagacccggatgaaggttacgatttgccggagggaagcgttcttgtgactttaacgtttgatgtcattggaaaaggaaccgcagcggtttcaccgcaggttaagcagttcctgagtatgcgcaaagacgccgacgggaaatatttgaacctgactgactatcaaattacatctgatttgataaaaaaataaataaatttaagagagcgccgcggttttccgcggcgcttttggtttattgagtgagaatacgagaatcaatacacttcatatttgccaacttgagggagatatggtatagtatttccataatggcggttttttcggttttcccggaaaaaatagcagcatccgcaatttttatgaggtgatattttttggaagtcaatattttaatgggcgtttgtatactgctgctcattattctatccgcgtttttttcttcggttgaaacggcgttttccacagtcaacacgattcgcctgcggcatgacgcggaaaacggaagcaaacgggccaaaacggcgcttacaattacagaaaattatgacaaagcgcttacgacgattctaatcgggaataatattgtaaatatcggctgctcgtctattgcgacggtgctgtgcctgaacctgttcggagatatgggcgcggctatcagtacaggcgccgttacgatacttgtcttgaccttcggggaaattttgccgaaatgtatcgcaaaggagcacgcagacagctattgcctgcacacggcgcaggttctgcgggtcctgatgacgatattcagccccattgtttttctgtttgtcaaactgaaatcctttgtgcttgacaggatgcgcaaaaacgaaaaatcgccgtctgttacggaggacgagttgaagtttattatagagagcattgaggaagagggcgtgcttgaagagcaggaacgcgagctcgtccagtcggcgctcgattttgatgaaaaaacagtacaggaggtccttacgccgcgcgtcgatattacggcggtcgacatagaggacgacgcaaaagaagtggcaaagctgattctgtctgagcgtttttcgaggattcccgtttacaaggacaatatagacaatattgtcggtatcctgcatacgcgcgatttcctggaagcgatgattcacggcgaaaagccggaaatcgcaaagcttatacagcccgcgtattttatttataaaaagaaaaaactttctaccgtgcttaccgacttcaaacgtaaaaagctccatatggcaatcgtttccgacgaatacggcggaacggtcggcattgtaacaatggaagatttgctcgaagaaatcgtaggggaaatctgggacgaggatgaagaggtagagcagcagtacagagccctgcccgacggcggatatgaaatcaatggggatatggatattgacgaaatgctttcgctgtttggaatgaatgaaaatgcaattgaaagcgacagcgtgtcggtcggcggctgggtgtttgaaacgctcggcagtattccagaaaagggagacagcttccaattcggggagctctgtattactgtaacagaggttaccgagcagcgcattacgaagctcatcgtccggcgtactgtaaatcagacagaaactgacaaggattaaactgtcaggcaaaaaaacagcataaataaaatcaccgcaggagaaaataaatgcggtggtttttttatgagaaaaatgaaacaggatgggtttctgttttccttcggcggaattgcatatggtttgatagagctgctgtggcggcggtatacgcactggtcgatgattattacgggcggcgtatgctttgtgatgcttttcaggatttttaataaaatgcagcggatttccctgcttaaaaaatgcttgattggctcggcggttatcactggcgtggagctgattgtcggctgtatcgtcaatcttattttaaagcttgaagtatgggattattccaacatgcccttaaacctgcttggccaaatctgcccgctctacagcctgctgtggggcttcctgaccattccgattgtctttctgtgcgggaaaatgaagcctgtcgtcaaaagaatctgaaacaaaatgggaggcagcgtacgctgcctcccaaatctttacctattctccaattaagttgttgcgctccagccattcctggtgcgtcatgagcacctggcgggacttggagccttcgtgcgggccgacaatgcccatctgctccatctcgtcaatcagccttcctgcgcgcgcatagcccaagcgcaggcgcctctgcagcagggaggtggatgcttgcccggcctctacgacgcattttatcgcttcctcgagcatggggtcgcggttttcgtcgccgccgttattcaaagcggagtccttgccgtttgcgccgatgtcctgcgaggcgattttttcaatctgctccacaacagtttcgtcgtaatcggactggtaggattttttgatatagcccgtgacgttttcaatctcctcgtcggaggcgtagcagccctgtacgcgtaaaggctttggcgcgccgacaggggagaagagcatatcgccctttccgatgagcttttccgcgccgccgaaatccaaaatggttctggagtcaacctgtgatgaggttttcagcgcaatacggcttggaatattcgctttgattacgccggtaataacgttgaccgagggacgctgtgtcgcgatgaccaaatgcatgcccgccgcgcgcgccatctgtgccaggcggcagatggattcctctacctcgttgggtgctgccatcatcaggtcggccaattcatcgattgcaatgactatctgcggcattttactgtcgggaatcggaaggccgtcgtcagtaagcgggcggtcctccttcggtgtttcgggcgggacattcgcatagcgcttgcggtacttgtcaatcatggaattgtatgcgtggatgtccctgacattgtaggccgcaaacgttttgtaacgctcgagcatttcgctgactgcccagttgagagcgccggccgcttttttaacgtctgatacaaccggaatcagcaggtgtgggatacccttgtattttgagaactcgaccatcttcgggtcgattaaaacgagctttacttcatcggggctgcccttgtacagaaggcttagcaggatggagttgacgcagaccgatttaccggagccggtcgtacccgcgatgagcaggtgcggcatcttcgcaaggtctgtcgcgacgatgttgccggaaatgtcccggccgagcacgacggtcagcttgctcttttcatgcttgaattccttggaatcaatcagctcgcgcatggtaaccatgccgattaccttgttcggcacctcgattccaatcgcggccttaccgggaataggcgcttcaatccttacgccgtcagcggcaaggttcagtgcgatatcatctgaaaggtttgtgattttgctgatttttacgcccgccgcaggctgcagctcaaagcgcgtaacggacgggccgcggcagatattgatgatattggcctgtacgccaaagctgttgagcgtagatataagcttctgcccgttttcctgcagctcgtcgaacgcgccgctgttctcgccggaaaaattagggtgtagcaaatcgactggcgggtaatggtacccgttttcgttttccctgtgcttctgttccgcgctttccccgtccagttctacgggtaccgtctgcgggtcgggctgtatctggccggggtcgctcttgcgcggcttctttttcttttccattacgtccttcgcggcgaaggtagccatgggcttttcagcgtcgtcctcctgcaagggagacggcgttttaccgttcatcagtatttcaagccgcttgcgcttgtcgttcaaattctccggcgttttgttctctccgtcgattgggatgtcgatttttcccatacggaacggggaaccgtgggattggcttttttctttctttaaatccatgccggtttccagctcgggattttggaagagcggggggcggttttcaaattcctcgcgctctttttgctgctgctcacgcttacggttgaggttttcccgcgcggcgttcatgccctgcgcaaccttgtccgcgggcttcttcataattttgaagatatggcgcagcgtaataccgaacaggaacataaagcataaaagcatcgcaataattgaaaagacctctgcgcccgccttgccgcacagtatgacaagaggtatgccgagcacgccgctcaaaagccccgcgccgcctgtgtccgcgccctgcgtgtagagcctgccgagctcgctgaaatacgagataccggatgccgccggcgcttttaatatgtacatcagtgacgataaaaaaacaataaatccgatggcaagcgccgtttttcccgccatttttgtgccgagctgcttatcgagcgctgtcatcacagcaacatagataagcagtaccggccacagcacagccagcgtcccgaacaggccgagcataaagctgtgcaaaaaccgccagacgttttcgcccggaatgaatatgataaacagcagcagcactgcgcccgcaaggagcaggagcgctttcgactggcttgaaaggcggtgctttttctgcggcgccggctgttttctggcggctgattttgcggcgggttttctggctggcgcttttctgccgcctgccgccgctttttttgtggcctgctttgtttttgctgccaaactgattcacacccttaatgtttcacatcatataaaaggaacgtccttgtatttatccaaaagtaatcgggacgcctgtaaatacgtttgcgcccgtgttcatttctatcaggctgatgattatcacggcgataccgacgaccgccgtataaataacgaatatgtacatgcggtcctttgccagcatccatttgaacagcaggatggcaaagaagccaacgaccgccgaggtgattacacccgcaataatcggcataatctcaatactgctcattacgccgggcgtcgtgagcgcgtccttgagctcaaggacagcggccgcgaggatggacgggattgcgagcacaaaggtatagtcgagcgccgtctgcttgttgataccgcgcagctctccagcggcgagcgtggagccagagcgcgaaaggccggggaatatggcggcgaagcactggacgataccgacagtcagcgcgtcgacgatattaaagcgcgtccggcccgcgccgtttttcttgacgatacccttggcctcataccgtttggcggtacgcttgtttgaaaggatgccgagcgtaagaagcaggcaggtgaacagcagggaaatacccacgatgatgaaatagccgctgtttcccgaccatatgtccgccaggtccttgccggtcatcccgccgctgaatggaatcgggacaaacagcaggaacaggggaatcaggccgataacgagcatcacaagcaggttgcggtcgtcgtccatctcgctccatttgaacttgccggtaaaaatatcgcgcagtgtggaaaacagcgccttgaacagccggcctatcagcttatagtaaacgacgcagacggcagcaagcgtccccaggtgaagcatgacgttgaaaaacaaattgttttccgtcacgccgaggatatgctgtgaaatggaaaggtggccgctgctcgatacgggcaggaattcggtcagcccctgtacgatgccctgaataatcgcatcaaaaatattcattatgtatacctccaaattgatttccttttctctatgtaaacgcccggaagcggggcgcagaaggcgggcgtatgcccgccaaaacgcatcaagcgttatttttttctggcctttttttcgggctgttttcttgcttttcgcttgtctgccgcgcgtttgtcgtcaatcattttgttcaggcagttcatcgcgtcggaaagcgtgccgacgtcgtcaattaaaccttcttttacggcgtcgtcgccttcaaggatggtgccgacatcgagcaccagctcgccgatgttcattgcaagctcgttatagcggtcgtacgggatattggaattttcgcttacaaacgtcgtaatgcggtgctgcatacgcttgaaatattcaaacgtctgcggaacgccgagcgtaagcccggtcatgcgcacaggatgcacggtcatggacgcggatttcgcgatgaacgaatgctttgccgcaaccgccagcggaatgccgatggaatgcccgccgcccaaaacgaccgaaacactcggcttggtcataccggccatcagctccgcaatcgcaaggcccgcctcaacgtcgccgcctaccgtgttgagcaggatgagcaggccgtcgatacgttcctcctcctcaattgcgacaagctgcggaattacatgctcgtatttcgtcgtcttattctgggagggaaggatggtatggccttcaatctgcccgattatggtgaggcagtggatggtgtacttgccgttgtttgtaataatggacccggtttcgttgattttgtcagtattgctttcgctgatgggactgctttcctccagcgattcgttattatcgttatcctgctcggacgggttgggcacgaactggtcctttttatcattttttgaattgctcatgatacagctcctatccttaattcaaacagcgctgtacctgcgttttctctcaacacagtataatgcgccttcaaggaatagtttgccgttttctgcgcaatatcatacgtatttcattatagcattttatggtgtttacagcaagcattttccacaaaagaagaaagcttacattttaatctgaacttcattttttatttgtaaattataaacctaattctaattttataacaaaaagaggcggtttatccgcctctttccataagattactgtgtgaattcaggctgctaacgctcttccctgtaatagttgacgccgagcgactggggctgagaaaggtttttctttttgcgcatggaattgacaatcagcaccagcgccgtcacaaggaacggcagcatgacgtaaaacgccttggggatgtctgccaggaacgacagggccgggaacgcggtggcaaagtcgtttgcacgtacctggaaaacggagaacgcgccgaatacgagcgaaccgagcagcgctttcgcggggctccagcttgcaaagataacgagcgcgacggaaatccatccctgcccgttgacgcagccgttgttccacacgccgtttccgttaatcaacgcaatatatgcgccgcccaggccgcagatgccgccgccgaggatgatgttgaaatacttcatccggttgacgttcactccggacgcgtccgcggcggcggggttttcgccgaccgaccgcatacgcaggcccgcccttgtatgcttgatataaaaccagcatataatcgcgacggcaatggcgagatacaccagcatattatgggaaaacagtaccttcccgatatacgggatgtcgcttaaaaacgggattttcagctccgacagcacggcggtgaaatcgccggagagcttcgggttgccgccgggtgtgctttgaatcatctgctcgccgaaaaagttagcgaagcctgtgccgaaaattgtaagcgccaagccggtaacattttggttggcctgtaatgttacggtcaggaacgcgaaaatcagcgcgccaaacgccgccattgcaaaggaggcaagcagggaaagcagcaggttgcccgtatggaagccgatgaagaagccagcaaacgcacccatgtacatcatgccctcgacgccaaggttcaggctgccggatttttccgtgatgatttcgccggttgtgccgagcagcagaggcgtgccggctttaatcgcggcaaacaaaaaattaatgattgttcccaactgtgctcagctcctttcctttagacggtttgcgtaagacaagcttatagcggataaagaagtcgaatcccaaaataaagaagaggataatgccctgtaaaatatcggatactgccgccgaaaggccaaaggtgctttccgtaacgccgcagcccttttccaggatgccgagcatacaggaaatcgccagaattccaaacgggttgagcctgccaagccatgcgacgataatcgcagtaaagccgacgccgcttgctattcccatactgagggtatggctcgtcgcgtctcccgaaacctggagcatacctgcaaggccgcaaagcgccgcgcttaagaacatagtgcgcatgacgacctttttgacgttcatgccggcgtagcgcgccgtgttctggctgtcgccaacaacggaaatttcatagccctgcttcgtgtaattcaaatagaggaacacgaggatgacgagcaccagtccgacaatccagctcatatccatcccgaagaccttatcgagccacgcgttttccgggaatgaggagattttcgggaagcctccggcgttcgggtccctccatgggccgtcgcgcaggtattggacgatatagagcgcaatgtaattgagcatgagcgtcaatagcgtttcgttggtattgaatttacatttaaagaacgcggcgattagtccccacagcccgccgccgaccattccggcgataaacatgcatatcattaaaagccagtggggaaggccgcttaaaaacaggccggcccaggacgcgaacaccgcgcccataataaactggccctccgcgccgatattccagaacttcatcttgaacgcaagcgccacgccaagcgaggtaatcagcagcggtacgatgatgcgcaccagtgcaatcatggaaaggttcgttttaaagcagccggtcacgatggtggaataaaactcaatgggattgacgccgagcgccaggatgaagatgccgcccgccacaaacgccgcgatgaacgccacgatatacagggcaaacgtctttttacctgatacatccccgcgttttgccacacggacaagcggttccctgtggctcaatttaggctgttgctgcgccatcggatgcatcctcctttccaatcgcgtcggtcatcagtaaaccaagctcttccttggtcgcgctctttgcgtcgactattccggtaatccttccgtggcacaggaccattatcctgtcgcacagttccagcataacgtccaggtcctctccgatgaacaggataccgacatttttctttttctgctcattgagcaggttgtatatcgtataagaggagttgatgtcgaggccgcgcaccgcgtacgctgtaatcaggacatgggggttggcttcaatctcacggccgagcagcaccttctgtacgttgccgccggaaaggcgccttacgggtatttcagtgccgggcgtctgcacgtcgagctgcttgattattttttccgcgagcttttccgctgatttccggtcgacaaacggcccctttgcttcgcggtagcttttgagcatcatattgtctgtgatactcagggaagccgcaagccccattccaagcctgtcctcaggaataaagctcatgctgatacccaaatcgatgatttccttcggggttttgccttcaatatttttttgattataaaggatagcgcccttatctattttctgcaggccggcgattgcttcgcacagctccttctgcccgctgcccgcaacgcccgcgacgccgaggatttccccttttttcaggtcaaaggaaacgtctttgaccgcctgcgcgccatcgctgttcgatatggtgaggtggtgcacgttgagcaccacgccgtcgtcctggtagggtgggcagtcgatagcaagctctaccgcgtgcccaaccatcagctcggtcagctcatgcgcgttcgtttccgctgtgtttacggtcgcgacgctctcgcccttgcgcaggatagtcacccggtcgctgatttcaagcacctcacccagcttgtgggtgatgatgatgaccgcgcagcccttgtcgcgcatgttgcgcaggattccaaaaagcttgtccgtttcctgcggggtcaagaccgcggtcggttcgtcaaggattaaaatatccgcgccataatagagaaccttcaggatttctaccgtctgcttttcgctgacggacatctcaaatacgcgcttgcgcgggtcgatattcaggccgaatttctcactgatttcccgcgccctgcggtaccgctttttgctgagcacgcgcccctctttttttgcgccgataaaaatgttgtccgcggcggaaaagacgtcaaccagcttgaagtgctggtgtatcatgccgatgccgagccgtttggaatcctcgggggagtgtatggaaacctccttcccgtttacaaaaatctgcccgctttccgggcggtaaatgccggagagcatgttcataagggtcgttttgccggagccgttttctccgagcagcgccaggatttccccctgcctgacgcttaggtcgacatttttgtttgcgactacgctgccgaaagttttcgtaatcccgcgcagttcaatcgcatttttttgctgctgttcgcccatagtttcacctgctttacaaaagtaagggttgaactgtcctttaaacaggccggcggttcggtatgcttagagcacggctcaaggaaaagcgcggacgggctttataacccgcccgcgctttgggtgtgccttaatattctgctgggttaagcgacttctacgttcctgtagtaccagtggatgtcgcctgtgatggtcgcgtcgtcgagcacctcgcccgctttacatacgacgttgcccttgttgtccacgaggtcggcctccgtaagcttgccgtccttatccatgagcttgccttcgaataccttgaagctgccgtccttaatcatctttgaaacagcgtcaatcttttcctgcgtaccttccgcgcagttttcagagagcggggagatagcgacgaggccgtcgtccatgccgccgaagtagttgccaagctcgccccatttgccgtcgatgacagcctgcacggccttggtgtagtaaacgccccagttccatacgggagcagtcaggtgcgccttaggcgcgtccttcgtcatatcgctgttgtagccgcatccccatacgccgcgcttttcagcggcaagctgcggagcggttgtgtcgcagtgctggccgatgacgtcgcagccaaggtcgagcagggcttccgccgcctggccttccaggtctacgtcaaaccaggaattcgtaaccttgatataaaccttcgcgtccgggtttacggattcaacgcccatcgcaaacgcgttgcagccgccggtaacctcggcgttggtgtcgcccatcgcgccgacataaccgattttattcgtcttggttttaagtcccgccgcaatgccggcgaggtaacgcgcctgatagatgcggccaaaatagttgttgaagtttttgtcgttgctcttataacccgtgccatgagagaagtacacgtcgggatactgcccggcaaggtcggccatggtatccatataaccccagctagtgccgaaaatgatgttgcagccggcctcgatgcattcctcgattgccgtctttgtcgcggcggcgtcaccgtcggagatattattcttgcggacaatctggctgtcagaaaggccgaggtccttctgcatggctacgatgccctggtcatgcgcataggaatagcccgcgccgtcgctcgggttgccaatgtggataacgccgaccttaatctggtccttggcgatgccggccgtctgcgtgctgctgccggaatccgtactgctgccgccgcccgacgaggtgtttccgtctgagcaggccgcaaaggacattaccatgagggccgcgagaatgattgcgagtaacttcttcatgttttctaatcctccgttttgatatattgtttttattccagggaagggatccccgtttaacaggttggatggcggaacacaacacccgtttccgggtccatgctttcaacgatagcaagcgactctaaacgcacatccatagagcggatgagcgtcccgccgggctggaagcctttttcaatcacaatgcccgcgcccgcaagcgacgcgccggaatcgcgtattaggttaataagccccacaagcgcgttgccctgcgctaaaaaatcgtcaatcacgagcacgttgtcgtcctggtttaaaaagtcctttgaaacgatgatgtcgtaaatcctgccatgggtgaaggactccaccttcgcggtgtataagtcgcccgcgatgtttttagtctgtgtttttttggcgaacacaaccgggcaatgaaaaaactgcgccgttacgcaggcaattccaataccggaggcttctatggtaaggattttcgtaacattgcagtcgccgaatagtctgtaaaattctttgccgatttcctgtaacaaatcgatatcgatttgatggttcagaaagctgtctactttcaggatattgccggcaaaaaccctgccgtctttcataatcctgtcctctaaaagctgcattttaagtaccgccttccaaaaaatgtaagcaaattgtaacaaagctgtaaatagaatataaacaattatataacaaaaaaagacagaatacaactaaaaaaagtatacaagttcctttttaacaacccgcatgttttcagaactttttctagaacagcgcatatcaagctcgggccaaataaggatggcgcttatttgtatctgtaaaaattgttatattgaataacttaaatttctttgtgcaaattgttttagatttctctatttatttgtaaatataactaaaattatcaaaataaaagatatcaagtctatgtcgcattgacaaacataagaattgtttttataatacaaatatggatatccatagaaaacaatattcgttaaggaggtaattacatgaaaaaattaaaaaaggcggcaatttttatcaccctgcttgcggtgcttacgtcatgcttctgcatgtctgcgggcgcgaccaagtataactgggcgttcaaaacggacaacttctatgacagcggccaaaaatattttaacgccagccctggcaaccgcatccggtttgtcgcgacgccgaagtgcaatatttcatcagcaacggtaacatataatctctacgcctgttactggaacggtgcaactctaatgccaaaaagtcagattaaacctgtaaaccagcagattagagcttggtggcgtgataccaatccgggaaattattccacgacacttcaagcacataacaataagtattcatctggtttacgcgcaaccatcgaatatccaagcgcctggctcgaaaatttctggggcgacctttggacctaataaccatcgctacggccggggcgggcttgcctgccccgactcgattttgtatcaatataacggagggcaaatatgcagaaggaaaccatcataaaaactatggaattgtacaaaacctacggcagcggggaggcggcggtgcgggcgctcaagccctgtaacatcaccgtatgcgccggggaaaagatagcagtcgtcggcgcgagcggctccggaaaatcgacgctcctgcacctgctcggcgggcttgatcgccccacgggcggcgtcatattgttccatggggaagacctgtacggcaaaaaggacgcggcgcttgcaaggtttcggcggcagaacgtgggctttgtcttccagagctataatctggtgccggagcttacggcggaggaaaacatccgcctgccccttctgctcgacggtaaaaaaccagacaagggctactttgaccaggtggtacataccctggggctttccgacaggctcaggcacttccccggggagctgtccggcgggcagcagcagcgcgccgcgattgcgagggccgtcatcggcaagccctccgttttaatgtgcgatgagccgaccggcaacctcgacacaaagagcggggaggaggtcatgcgtttgctccatgagttgtccgataatttaggcgtgacgctaattgtcgtcacgcacgacgaaaaaattgccgctcagatggagcggcgcatcaccattacggacggcacggtggggggcggcgcttgtgaaggctgaatttttattgaccgggcggtacatccgcaagcataaaaagcagtttttcgcctccatcgcctgcattgccgtgttcgccgcgtccatcggcgcggtgcagcttttcaggctttcgagcgacaacaacacgcgcgaggaacggtttagccaggagggcaggctcggcggctacgcgcaggacgcggacccgtctttgattacggatggcgagcttgaaaaatgggacgccggcgcgatttacattacgggtgaggcgcagaccgatttcgatacctatgaaaacacgacctatgtgggctttatggacgagcgggcgaagaacctgcaaaagctcttattgaaaaagggcggttaccccaaagcgccgacagaagcggcggtagtcgaaaccactgccaaggcgctcgggctgggggaaattggggaaacgtttaccctcaatataacggaagacggcaaaacagcaaaaaagaaatttatcctggccggcatcctgcgggaatacccgctcgattcctggcgggtcatgccgcaggtgctcacaggcgagcagggcgacaggaatacataccttaaaactaatattgtatatggaattgatttaaataaaaatagggacgcaaatctgtttggttcgcaggactataacggtccgacggcgactgatgaaaagccgagtccgaacgagcagatagtaaacgcgaatatgcgggtgacgagcaccgtgctttcggcgtttttcctgttgctcgtgctgctcggcgtgtacacggtcgtgaaaatcacgttccaggacaggcagcgccacatcggcctgctgcgttgtatcggcatgaccaaggggcagactgtcctgtcgctggttgtgcagggaatcattctcgcgctgtgcgcggctgtgctgtgcgcgccgctcggcgtaggctttgcgtgggtggcggcgctcgtcatgcggctttccggctacccgttcttcacgcttgtcatagaattgcagccggtgctcatttcctgcgcagtctgcgcgggggccgtgctcctggcgtttatattacagtcgattacgcttttgcgccgcggcgtcctgtcctacggcacgcagccaaaaccgaagcgcacgcgttccggggcacaaaagcagacctcctttgcgcggctttgggcgggcaggggaagcggcggcgtacaggataagctctccgccgtgctcattgccggctgcgtcgcgattttgctgttcggtacgtttaccgcgcagttttctgctttgcaattatattactggcagggacaaaacagccagaaatacggctgcgattacgaaatctatatggggaaaggtgacagcgttttaccttactttacaattaatacccccagagagagcggcgtttccgctggcaatatcggcctgctcaggcagacggaggggctgacggtcgacagctacgcgattgacgacatgtgcaccgcgtggatattatcccccggcaatatgtcctcggacgtattaaaacggtatgaaaagaagggctcctattatacgaaatacggggatgaaaaggagcagcgcgaaaacctgaagtacgcgggctacaaggaaggggaaaacctgctttcccagaagtttgtgggcctgagcttcgaccaggtgacggcggcaagcaaagccctgcaaaacgaggcggtagaccgggcggcctatacaaagggcaggcaggcggtcgccttcggcgacggttaccagaagggcgacaggctcacagtatctatccccgtctataagccggaggacgtgtacggcgaggaaacggcaaagcccgtcatccacaacgtagaggtcgagattgccgccgtctgcgaaacggacgatttgcaaaccccgttcatgaagcagatgaaaacccggtatcccgactggattgcaatgtccgacgaatttttgatgagcctcgacagcagcctgcgttacgactacacggcaatttcgtacacaggcgaccgcgggaatatggaggcggtacgcggcgctgaggacacaatccagacggcggtcgcgcagtccacgggcgtgcagcttatggattacctcaatttaagcgagaaatgggacgccgcggcacggcagattcaaattccggtgctcgtgctcgtcgggctgttcctgctgattattttccttgcgctcacgctttcaaacagcgtgaaaatcaagagccgtctgcgcagctattccctgctgcgcgccattgggctcgataaaaagcagctgctcaaatctgtgttttattccaccctgcgcatctgcctcacgggcgcgttaatcggcatttgcgttggcttcgccgcgagcacatttatttatgtgacaagcgggcacggcatcccgattgcaaacgttatcctgggcggtatgctgcccgcgacgataggcgggattttactggtgacattgatttctcttctgtcctgcctgaatccctgcggctgggtcataaagcagaatataactgagtcaatcgactctgttcagtactaacgccgtaaaatgtatatctataaaacaaaaaattggcgttgtgtcttgacagcgttttattccggcggtataattttaacaatagcaaacggctttgacgggaagaaaaaccggcttgcgcgctgaagagaggatgggcccacggctgaaaggccctctgtgcgtgcggtttgggccgcccccgagctactgcggcgaggagccgcggcgtttccggcgttaacgggccgaaagaggcgggcgctctgtccgcaatttgggtggtaccgcaggagtttatgctcttgccccatacttggggcaagagctttttgtttgccgcaatttaaatgaacaggagattatattatggaatggacaggactcaatgagctgagggaaaaatttctttccttttttgaaagcaaggggcatctccgccttccgagctatccgctcgtaccgaaggacgataaaagcctgctgcttatcaattccggtatggcgccgatgaaaaagttctttaccggggaggttacgccgccgagaaagcgcgtcacaacctgccagaagtgtatccgtacgccggacatcgagcgtgtgggcatcacggcgcgccacggtacgttttttgaaatgctcggcaacttttcgttcggcgattactttaaaagcgacgcggccgcctgggcctgggagttctttacaaaggtactggagatgccggaggataagctttatgtctctatttttgaaaacgacgacgaggcatatgatatctggacaaaacaggtcggcgtttcccccgaccatatggtacgccttgggaaagaggacaacttttgggagcatggcaccggaccgtgcgggccgtgctctgaaatctattttgacaggggagaggacaagggctgcggtaagcccggctgcgcggtcggctgcgactgcgaccgctatgtagaggtctggaacctcgtctttacgcagtttgacagcgacggaaagggcaattatacgccgcttgagcacccaaatatcgacaccggcatggggctggaacgtttggcctgcgtcatgcagggcgtagataacctgtttcttgttgataccgtgcagaatatcatgaagcatgttatcgatattacgggcacaccctacggaaaagacgaaaagaccgatatttccctgcgcgttattaccgaccatatccgcagcacagtctttatgataggcgacggcgtcatgccttcaaacgaaggcaggggctatgtcctgcgccggctgctcaggcgcgccgcgcgccatggcaggctgctggacgtaaagcgcccgttcctttatgaggttgcgcagacggtcatcagggaaaatgagtcggcttaccctgaacttgcgcagaaaaaggatttcatcattaagctgataaaaattgaagaggagaatttctccaaaaccatcgagcagggctttaacatgctgcacgatatcctgggcagtaacgaaatcaaggagctttcgggcgaagacgcgttcatgctcaacgatacctacgggtttccaatcgatttaacaaaagaaattctggccgaaaaaggcatgacggtcaacgaggaacgcttccgcgagctgctggcagaacagaaaaagcgcgcgcgcgcggcaaggaagaacgccggggcagacgcatggctcagcgagagcatagacctttccgacttgcccgcgacgcagttcaccggctatacggaagacactgcacaggcgaagctgcttgcaatcgtccatgagggggaacgcgtgggtgctgcagacatgggaaagcaggtcgttttggtatttgacaaaacgccgttttacgcggaaagcggcgggcagacgggagacagcggcaaggcgggaaacgcgcaggcctctttaaccatacgggacacgaaaaaggaccattccggctatttcctgcacagtgcggtaattgacgacggcgcggtatcggtaggcgatacgctgacgcttcagattgatacaagccgccgcgcggccatccgccgcaaccacacggcagcgcacctgctgcaggccgcgctgagaaaagtgctcggcacccatgtggagcaggcgggccagctcgttaccgacgacaagctgcgtttcgatttcacgcatttctccgctatgacggcaaacgagctgctcgaagtggaggatatggtaaacgccgaaattttgaaggcggcggacgtaaccgtagaggaaatgccgattgaaaaggcgaaggaacgcggcgctatggcgttgttcggcgaaaaatacggcgatatcgtgcgcgtggtacaggcgggcggtttctctaccgagctgtgcggcggcacgcatgtggacaatacgtcgaaggtcggattattcaagattttgagcgagggctcggttgcctccggcgtcaggagaatcgaggcggtcacgggaatgggcgtcatcgatacgctcaatagctacctgggcgttatcggcgaggcgtgccaggcgcttaaaatcggcaacccgaaggagcttatccgcggctgcacacagatttacgaagatttaaaagagcgcgacaggctaatcgacgagcttaacggcaagcttgcggcgcttaaaattgacgatatgttcgcaaactctgagcttgtaaagggcgtacgtattatcacggcggcgtttaccgacgtgggcgccgatatgctcaaaacaatgtgcgaaagggcgctgagcatggcgccgaagtgcgttgtgacgattgccgccatcgcggacggcaaggcttcgtttgcctgcgcctgcggcaaggaagcgcagcagaagggcgcgcacgcgggcaagattgtcaaggcggtcgcgcagattgctggaggcaacggcggcgggcgccccgatatggcgatggctggcgcaaaggacgtttccaaggtggacgacgcgctcgtcgccgcgaaacagattatcctcgatatggtaaccgaataacgcttatgcttttgtgagcgaaaaacacagtttcttgacgaaatttcccacccccgctataatcaaaacagcgggggtgtttttatgcggtggagcaataaagcaacgaggttatatgttccgtgttctccggttttgtttcgcgggaattatttaaaagaagttgaaccgccgcattttgaacggcgttggtggaacaggccggatggatatcttggcagcattgcaaacgacaggtttcgctttttcttcagaaccatactttactggggtggttccgatatgcttgccggggaaattgagccttccggcagtggtttttacctgacgtaccggattaaaaaaacggcagccgttgttgtggagaattccatagccgcgattagtatggcaaatttcttctggctgctcctgtttttgattggccttggtgcgttttctttgccgtttattataattggttctgccggaaccgtaacgattttcacctttttcttgtttataaaaccatattgttatcgggaacggctatcaaaaaaactggatgaactttgtggcggacaattacgttttgaggtgggatgaaaatgaaaaagcatactgtgtttttgccgatgacgcttgaaggctttgaccagagctttcgtgcgaacgtcccgtatttaaatctgaaaacccctttccgttattttgcggatgaaaactatatcggcaggctgaaaaacgggcagtttacgctttcttatctccaggtttataaccacggcctttttacggtgctatccggaaaagcggtaaaatgcgagggtgggattttacttacgtaccattacaggaaatcggcctatctcatggttgttttctcgctgatatctgcaattgcccttttgatggagggggttgggctatacgcggttatccagtctcaggccaacgccgcccttttgctgctgccaatcccgttttttgccgtttttcttttactcatgcttgcaaaagcgccgcgggcggaaaaacggctgtatgataagcttgacgatatttgctgcgggctgttggtggcttcgcgcagggaggaggaataaatgagcaggaaaaaaaccgtgtttttaccgatgacacagagggaatttgaacggaggtttcgggaaaacatccggcatgtcaatgtgaaaaacgacgaacggacttctgtagacggggattttatcgggcgcatatcgggcggccgttttttattttattaccgtgtgattctcggcagcgaacggcggtatatcctttcaggaaaaacgcagccctattccggcggaattctgctgacctattggcgcaggcggccgtattctgactggatttatcttgcttttgtgctgtgcttgctggcctatacaattgccagtgatatcgccagaggggtgaagataaccttctcaccggaaagcctgcttccgctgctccttttgctgcctgtcgtatttttcgatatcttggcgggttttttaaaggaaaagccggtaaatgtcaaacataggctttataataagctgcaagatatctgcgggctgattctgccgtgaaaagaaaaaaagcttgaacggcaatagattgtgctttataatagaaaaagacgaatatatcgggaggaagcattatgaaaaaacgaactgcattggtacttgcgctggttttagccttgtcctgcgcggcattagcgggctgccagaacggggataatcatgcgggaagcggtacggcttcggtgacgtcggttcagaccggggaggagtcgcttaccatggagcaggtcaaggagcttgccaaaaaaggcggccagctcacctgggcagatattacaaaatacaaggggacaaacgcaggcaaggagatggttgtcgtagcctttccggtggaggacggctataagctgacagccgccgggacggatttagacaaggcgcctatgtatgttacgctgactaagaatggcaaaagcaagggcgtcgatatccgctatgaggatattgacgcgtatttgaaggagaaataaaagaacaaaagggcctccggagagaaatctttccggaggccctgattatggttgataacaaaaagcgggaggggctggcccctcccgcttttttatacgttaatttcgctgtagcttgcgcggttgatagcgttcaacacgcccgcgatggacgccatattgatattgctctcgattccgacgccgaaaatgctcttgccgtccggcttctgcatctcaatgtacgcaatcgccttggagtcggagccctcgctgatggcgtgctcgtggtaggataggaacttgtatttagaaacgccgacagttttcagggcgttgaagaacgcgtcaattgggccgttgccgcggccttcgatttcccggtcggttacagcttcgttctcgtggatgcgcagcttgccttggaaatgcacctcatgcgccccattttggccgctgccttcctcaaagagcttgtgtacggtcagctcatattttttcgggatatagaggtattccttctcgaatacatgcaaaagctcgttcgggacgagctcgcgcccgagcttgtcacactccttctggacaagcgcgccaaattcaggatgcatcttcttcggcaggttatagccaaagttgttctgcataacaaacgccgcgccgcccttgccggactgggagttgatgcggataatcggctcgtactgccggcctacgtccgccgggtcgatgggaaggtacggaacctcccagtattctgtgccggactcgcgcatatactgcatgcccttgttgattgcgtcctgatgggagccggaaaacgcggtaaacaccagctcgcccacgtacggcgtgcgctcatggattttcatgttggtgcagcgctcatagatttccttgtatttcggcaggtcgctgaaatcgagctgcgggtcgacgccctgcgtaaacatgttgagccctactgttacgatatcgaggttgcctgtgcgctcaccgttgccgaacagcgtgccctcaaccctgtccgctcccgcgagaagcgcaagctccgtcgcggcgacgccgcttccgcggtcgttatgcggatggatgctgataatggcggcttcgcggtttgggagatggcggataaagtattccacctggtcggcataggtgtttgcggtgcacatttcgactgtattcggaagattcaagatgaccggtttttcctttgccgcgccgagcgcttccatgacggccgcgcagatatcgaccgagaattcaggctctgttccgctgaagctttccggggaatattcaaagcggatgttcgtgtccccgctgtaattgtcggtcagttctttaataagctttgcgccgtttacggcaatttccgtaatccccgccatatccttcttgaatacgaccttgcgctgaagcgtagaggtggagttatagaagtggacgatgacgttttttgcgcccttgatagcgtcgaatgttttgcggataagatgctcccttgcctggacgagcacctgaatggatacgtcgtcggggatatggcctccttcaatcagctcgcggcaaatttcatattccgtctctgacgcggacgggaagccgatttcgatttccttgaagcccatatcgcacagcgcatggaagaactcgagcttttcctctaaattcatcgggtcgataagcgcctggttgccgtcgcgtaaatctacgctgcaccagatgggcgctttggtgatgacgttgttcggccactgacggtcgggtaaatcgatttgcttgaaggggatgtactttttgtatgcttcgtacatagtaaaacctccgtttgtaaaattacattgaaccgctcacttctgaccattttgcgggatggaatttttaaagggtgtattaaaataaaaagtccctttccgtaaagaaagggacgaataaaatccgtggtaccacccaaattcaaacacgattacgtgttcctcacaggcttctatcaaagccctggccgttaacgcagccttgcgtcctgccctgggggataattccctgcggacagacaactccgggatgagctatccatacgaagcccgacgccgccttacaccagccggcagctctctttgcacgaggcgttcgcatcttattcccttcacagtctttcagatgagtcattcaattgttatcacaattatatgcacggaaaatttttttgtcaaggcttttttgaaaagaggctttttgcgcccttctcttacagccgataagctccggcaaccttatagagctcaagaacaagcgtttccactgcccggttgagcgcgtccccttcaaacatagagcaaaacagggtgttcaggttctcctcaaagcccgcgggcaggattttgcattgcgccttgcaaagcgccgccatgcgcttttctccgggatgcgtcatctcgttgagtgcgaaaatcacatcaaaataactcgccagaaattcagcggcgcggtggttgacgctgaccaaatcgccgcgcgcggccgcctttttaatctgtaaatcgtaggacggcagcacgccgctcaataagttaaggttctttgtaataatattgcgtttaagccgctccggatagggaacggtataccgttccttgagtgccgaaagccttcctttcttgtcaaaaacgatatcgcaggtcagcaggttgtgccacatacaggtggtatacccgtttgcgctgcggcattcgtccacaaccgctgcaattccgtgcgaaaaatcgtcaaggctgcggtagattatatcgatgtcaatcccgtttttaagcgtgcagttgtcctcgttctcccaatagtggttcccgatttccattacgctgcaatacgtttgcaggattgcttcccttgcatccagcccgaccggaccggttacgtaaaggtacacgtcgtagtcggaccttgcgtctgcctttcctgtcgcgcgcgagccgccaacagcgagcgcctctatctgcgggagcgattcaaaattccgcatgatgtccctgatatcatcgtacataaggtacctccgttaacctgcggcctcaaacaagcgctttcagcacggccttcagctcttctgttttgttgagcttttcccactctacgccgagctcctcgcgtcccatatgcccgtaggccgcaagcgggcggtatttcgtttcccgcagctttaagctgtcgattatcgcggcggggcgcaggtcgaacacctggtttacagcctttgcaagctgttcgttcgtatattcggaggtaccgaacgcgtccaccatgacagatacgggctttgccacgcctatggcgtaggcaagctgtacctcgcaccttttggcaagcgccgcgccgactatgttttttgccacatggcgcgccgcgtacgccgcgctgcggtctaccttcgtcgggtccttgccggaaaagcatccgccgccgtgccgcccgaagcccccgtaggtgtctacgataatcttcctgcccgtcaggccgctgtctccgaccggcccgccgataacgaaacggcccgtcgggttgacataaatttttgtatcgtcgtcaagcagggaagcaggtataacgggcttgatgacatgctccacaatatccccgcgaatttgctccaaagaaaccttttcgctgtgctgggtcgataccacaacagcctccacacgcttgatttggctgccgtcgtactcgaccgtaacctgtgattttccatccgggcgcaggtaggggagcgtaccgtccttgcgcacctgcgccaaacgctttgcaagcttgtgcgcaagggaagcggacagcggcataagctcctttgtttcgtcgcacgcgtaaccgaacatcatgccctggtcgcccgcgccgtacaggttgtatgcgtccttctcgccctgctttcgctcgtagctttcgtttacgcccatggcaatatcgggcgactgcgcgtcgatagacgtgagcaccgcgcaggtgctgccgtcaaagccgcaggcagggttgtcgtagccgatggagcagactacgcccctcgcaatggaggcaatatcgatatagcagtctgtcgtaatttcgcccatcacatggaccatgccggtcgtcgccgtgacctcgcaggcgacatgcgcgtttttatcctgttccaggattgcgtcgagcaccgcgtcggaaatctggtcgcataccttgtcgggatgcccttccgttacggattccgaagtgaaaaagtgttttgccataatctattcttcctttctgattaacataaaaatccgctcccggcgtaccggaagcggaatcaaagctctcatcttccggttaaaccgcaggatttggcaccttacattcatgcaggttgccggacttcacagggcctgtccctccgtcactcttgataagcagatgttattgaattttcgttacccattataacacggcgggccggattgtcaagtcacaaaatctggttttccggcacgctttgacaacatggtatgcctgccggatattatccaacagacgggcgcagcagcaaaaagataagccctacagcgaaaataatctggcatacgcccacaagcccgccgaagagcatcgatttcgggccttccttcacaaggtcgcggaactttacgcgcataccgattgccgcgagcgcaatgatttcaaactgtccgctgatggtttttgcggtcgccccgacgacctgcggcaaaaagccgatgctggtgatgatgctcaaaaggaaaaagccgatgataaaccagggaacgcccgctttgaccttgccgtgctctcccgtttgtttggaaaaaagcttttcgccctcgtttgtgttgagcctggaaaagacgagcgcaacgagcacaaggaagatgatgcggataattttaaagatggtcgccatatcgacaacctcggtgctgaccatcttagccgaggcgataacctgcccgatggactgcagcgtaccgccgataagccccgcggtctgcagggtttcgtggttgtacaggagccccgcaatgagtgggagcagtatcatcataaacgtaccggtgacattgacgattgtaatggaaatacccttatctttcgactcagccttgaccacgggagcgaccgtcgcaatcgccgacgagccgcacactgcgttgcccgcgcacatgagcatggtgaacttcttgccgaagccgagctttttgccgattaaatacgccgccgtgatagtcagcgccatctgtaaaaggataaagatgacgccggtaatcccaacgcccataatatctgttaaattgagtgtcaggccagtcaggacgatggaatattccaacaggtttttttcagagaactttgagccggcgttgaacacctcgcggtttaaaaaggtgttgccggcaaggatacccagcaagatggcaatcagcgccgagccgattgacgggatgtaattggctaaaacctgggcaattacggcaatcacggcacagaccagaaagcccggaattatttttttaactgtttgtaacgcgttttgcaaggaaaagaccctcttccggttgattttacggcatatggattagatttatgccgcttgttattttccaaaaagcatcataaaaaaggcggcggcaagcaccccgcaacatacccagatggaaggggtgccgaacaggccgcaaagcagcgtgccaatcgccgcgccagccaggaaaacgagaatgaccgcaaagtaccgcagggacttttttcccgcttctttatccctagtttcaaggaaggtaaacaggaattcccccgcgctgcgcaggttgcccgtacacatggtagacgcgtacggcaggccattcgttttacggaagctgttaaactgcatggagcagacaaacgaaatcgcgatatttaccacagcgtttgggacggcccgcggcaggagcccgatgacaaacagcatcgctatttctattaaaacgacgatatgctgccattccacgaatttcctagggctgaatttccgtttgaaaagctccgtaatcagcacgcccagcaggaacgcgaaaaccggcgcgagataaaccaggaagcccgctggctcgccctgcgccatatggacgccgagcagcacaaggttgccggtttgcgcgtttgcaaagacgccgccgcgtaaaagataagtatatgcgtcaagaaagccgcccacaaacgcaaggcaaaggccgatataaagcgtttcatgaattgggatattgctggaaagcttgccctttttcaaaaagatcccctctttttgccgaaatggcatgatatatagtatacagtgaaacaaaaattttgtacatcgtccgggcgtaaaaaaagagcggtacgccccgctcttttttgttgctttaattaaattgcactgtatatcagctataggtatataactgcctgtaagggtttttggtgtcgggctccagaacgtaaaaatcatgatggaggatttccttcttcttcgctttaaacgcattgcagtagtcgtctatatattcgtcaattacgctcatgtcctcttccgtcgcgggccgcgcggccacctgctttggaaggccctgcggcaaatcctgctccttgcagcgcaggtagattttgccgccgtgcatcccggttccgcagaagttgccgacaatcgattttgaatccgtattgacgccaagcacaataatcaggccgcctgcctggtattcgcctaaaaagcttccggcggccccgccgattacaatcacggggagcttatccttatatgccttcatgtggatgcccgtccggtaaccggaattgccctcaatcaggatgcgcccgccgcgcatggcgtagccggtagcgtccccgcacgagccatggacataaattttgccgctgttcatcgtgtctcccgttgcttcctgggtgttgccgtacacatggatggtacagccgttcaggtaacaacccagggcgtttcccggtgttccgttgataacgatatcctttccggcaagcgcgcttgcgatatagcgctgccctgtgcagctgtcgatggtaacctgccggtcgcccgtttccctaatcaggctgttgagctttttaaagtgcattcggtccgcctgtaccttcatagcgtcatccctccaagcgttttggccctttcgcgttttgaaaaggccatcaactgcggcttttccttaatcaattcaaagtcgattgttttaaggctctttttttcacggataagcgacgtataaatgcccgcgcgctccacgttgcccaccatgatgtagccctttaataaatcgtcctttgtaaccagctttttataattctgcgtactcttgtccgctacgatgtgctcctgcccgccgtagcttccggcagtgatgacgtgcaggccaaaaaagccaatggcgttcatggggattgccttgtcgtacagggcgctgccgcccgccatattgatgcccgcgcattcaccctgcatgtaggcgttaggcagcagcgccagaacgcggtcctcgtccgtcgtgatgtcatggctcctggcgcagtcgcccgccgcgtaaacatcgggaagggccgtgcggcatgcttcgtccgttacgatgccgccctgtacctgcgcgcccgcgtcctgcagcagctttgtgttcgggcgcacgccgacagcgagcaccagcgcgtcgaacggaatttttttgccgcttttaagcgtcgccgtattttgggtaaagcttttgacgctgtcacaaagcgtaaactcaacaccgtgcttttcaatatgctcctgtacaattttagagcccgttttatcgagtatgctcggcagaatccgctccgccatatcgaccacatggatgtgcttcacccttttttcaatgccttccgcgcacttgagccctatcagccccgcgccgataataagcacacggctgtccttggtaattgcctgttccagcgccttcgcgtcgtcgagcgacagaaaggtaaatttcttttccaccttttcaagcccctccatttgggggacgaagggggaagagccggtcgcggcgagcagccggtcgtatttaacctttttgccgccgtccagcgtgacttcctttttttcgctgtctaccgacacggcttttttgccaagcagggcggtcacgccgttttccttataaaaattgccgtccctgtatttcatgcgctcgctgtctgtttttcccagcagcaggtaagagatgagcgggcgggagtaggtatggtatggctcgtcggaaataatggtgattttgccctttttatcgatttggcggataccctccacacagcctacggccgcggcggaattgccgatgatgacatagttcatattaccgctcctcccattcaatcgctttgttggggcatcccctgacacaggcgggtgttcctccggcgttcttcacacaaagctcacatttctgcaccacgccgccttccgatggtgtgatacagccgtacgggcaggtgagcacgcaggtatagcagcccacgcatttgtcctggttgacctctataacaccgttctccacagacagcgctcccgtaatacagccctttacgcacagcggctcctcacagtggcggcaggagacggcaaagctgacagagttatgctcctcaatccggatacgcgggttgatggtgatatttttcagggcctttgccatatcgtccttgccggaattcgcgaacgcgcagtaatattcgcagagatggcagccaaggcaccatttttcattgacataaattcgtttcatagccacatctccttattctccggcatgcttgatgccgagtatgccgagctccttctgcgtcaggccgattcccctgagcatcaagcggttgccgcgcagggcttcaatggagttgatgcccattccgcccatcatttccttgatttcgtggtcccaggccgtcacgaggtttacgagccgttcacacccgatatcggggtttaagcgccgcacaagctcagggcgctgcgtggcaatgccccagttgcacttgccggtctggcagctccggcacaaatggcagccaagcgccagaagcgcgcttgtcgcaatatatacggcgtccgcgccgagcgctatggccttgacgatatccgagctgctgcggatagagccgccggcgacaatcgagacgctgccgcggattccctcgtcgcgcaggcgctggtcgactgccgcgagcgcaagctcaaccgggatgccgacgttgtcgcggattctcgtcggcgcggcgcccgtcccgccgcggaagccgtcgattgcgataatatccgcgccgccccttgcaatgccgcttgcaattgccgccacgttatgcaccgccgcaatcttgacgataaccggctttttataatccgtcgcctcttttaaggaatagacgagctggcgcaaatcctcaatggaataaatatcgtggtgcggcgcgggggagatggcgtcggagccttcgggaatcatgcgcgtttttgaaatgtctcctacaatcttcgtgcccggcagatgtccgccgataccgggctttgcgccctggccaattttaatttcaatcgccgcgccctgctctaaataatccttatagacgccgaaacgcccggaagccacctgcacgatggtgttttttccgtactgataaaaatccttgtgcaggccgccctcgcccgtgttataaaaggtgccgagctcctttgccgcgcgcgcaaggctttcatgcgcgttgtagctgatggagccgtaggacatggcggaaaacatgatgggaaccttcagctcaagctgcgggctgaggttgtttttgatgcggcctttatcgtcgcgatccacccgctgcggctttttgccgagaaaggtcttcgtttccatcggctcgcgcagcgggtcaatggaagggtttgtcacctgggaggcgttgatgagcattttgtcccagtagattgggtattcctgcgggttgcccatggaggacagcagcacgccgcccgtgcccgcctggcggtaaacctcgctgatggcgtccttcgtccagtttttgttttccttaaaggtgtggtccgtcttgactattttcagcgcccttgtcggacacagcgcgacgcagcggtggcagacgacgcatttcgattcgtccgcgaacatcataccaagctctttatcgtaatggtgcacgttgtttgcgcactgcctttcgcacacgcggcaggttatgcaccttgtatggtcgcgcacaacctcatattcggggtataaaaaattgaccggcattagttcgcacctccgtttactgtgacgacgacgggttccccgcccttgggcgcccagattttgttgggctcaggctcgattacacggattgcggcttcctcgcttgcaaggtaaaccatatcatttttctccccgacgaccatggaacgcagcttcagcctgtcgtttagggccatcagcccgccggtaaagccgacaaggatggaaaatgggccggtaatcaaaaagcttgcgaaagcgttgcgcaaataggtcatgcgctcgcgctgcgccttcggcattgtttcgatggtgctccaaaacggcgccgccatcacaaaggccgcctcctcataggtcagcccctgcttgcgcacgaggtaatctataatataggtaatcgcctccgtgtcggtaaggagggtacagctgtagcccatcatttcaatatagcggcggtttgcgtcgtaagaggaaatttccccgttatgtacgaccgagcagccaagcatcgcaaacgggtgcgcgccgccccaccagccgggggtgtttgtcggataacgtccgtgcgctgtccagcagtagccctcatactcgtccaaacggtaaaatacgccgacgtcctccgggtagccgaccgccttgaacgcgcccatatccttcccgcttgagaagacatacgcgccgtttatttctttattgatatgcatcacgcttttaaaaacgaactcgtcctccgacacctgcatggcctccacgcggtaggggaggggcttcacaaagtaacgccagatgaggggctcgtcggtaatcgccttgagcttacgggtcggcattttcgacatgctgacgatttcaaagctgccgcttatatatttataacattgctcctttgaaaaatcatcgtcgtaaaatacatggaaggcgtaaaaatccttgaattccggataaataccgtaagcggcaaagcctccgccgaggccgttgctcctgtcgtgcatgacggaaatcgattgaatgatgctttccccattcatcctcgttccgttttttgaaatcatgcccgaaatcgcgcagccggacggtattcttacctgtccctctctcataacgtttcctccttattgattcacatattcagcctgttgcatatactatcatatagtaagggtatgaaaacaaatattaatgccgacaagcttgttttgcatgttttacttttaatatttcataaacagctggtataagttgcgtaagcaacaggatatatactgattattgaaattgttgtaattaaaacctgcatttttatccgtagcacattatacccccgcacgaagaagcatgtcaagcatttctttttaatttttgaaatttgtttggataaaatttcatgaaatgttaaatatagctgatttaatttgacaaacagcgtttcaaatgcaagttttttataaaatcctgcaaaatctgaaaaaatcattgacaaatggaattggctggtatatactctagacataacagcaacggcgctgtagggaattcccctgcggcgccgttttgttttactaaaatattttttagggacaggagtttttagtatggcaagtattcctgagattttcggcagcatggtattcgatgatgtatcgatgaaggaacggcttccgaagcaaacctataaggcgctgaagaaaaccatcgagcttggcgaggcgctcgacatcaatgtggcaaacattgttgcaaacgccatgaaggactgggcagttgaaaagggagccacccattacacccactggttccagccgatgaccggcattacagcggaaaagcacgacagctttatcaacccgaccgacgacggcagggcgattatggaattttccggcaaggagctcattaagggcgagccggacgcttcgagcttcccgtccggcgggctgcgcgcaacctttgaggccaggggctacaccgcctgggacccgacctcctatgcgtttgtcaaggacgataccctttgtatcccgaccgctttctgctcctatacgggcgaagcgctcgataaaaagacgccgctgctgcgttccatggaccgtatcagcacagaagcgctgcgtattctccgtttgttcggcgacgaggaaacaaccagggtgcttaccaccgtaggtgcggagcaggagtatttcctgattgacaagaagctctacgaaaaacgaaaagacctaatctatacgggacggacgctgttcggcgcgcgcgcgcccaaaggacaggagcttgaggaccactatttcggcaccatcaagccgcgcgtttccgaatatatgaaggaccttgaccaagagctttggaagcttggtgtatttgcaaaaacaaagcacaacgaggtcgcccccggccagcatgagctcgccccgatttttaccacaacaaaccttgcgaccgaccacaaccagcttacaatggaaattatgcgtaaggtcgccagaaggcacggtatggtatgcctgctgcatgaaaagccgtttgcgggcgtaaacggaagcggtaagcacaacaactggtcgctgtccaccaacacgggcaaaaacctgctcgacccgggcaaaacgccgaaagataacgcgcagttcctgctgattctgatggctgtcatcaaggcggtcgacgagtaccaggatttgctccgcctatccgtcgcaagcgcgggcaacgaccaccgcttaggcgcgaacgaggcgccgccggcaattatttcgatgttcctcggtgatgagctgacggagattctcgattccatagagaacaattcagaatatgcaaacaagggctctgtcaggatggaaatgggcactgtcgtcctcccgaacatcaaaaaggacacgaccgaccgcaaccgtacctccccgtttgcctttaccggcaacaagttcgagttccgcatgctcggctctgcgctcaacatagcctgcccgaacattatgctcaacacgattgtcgcggaggcgttctgtgagttcgccgacgagcttgaaaacgcggaggatatcaggacggctgtgatgaacctaatcaaaagggaatacaaggaacataaaaggattatctttaacggcaacaactattccgacgagtgggttgaagaagcgaggaagaggggacttctaaaccttcgtaccatgccggaggccatgcgctattacatcgcggataagaatattggtttatttatgaaaaatagtatctttaccgagccggaggttcattcccgctatgaaatccagctcgaaaactatacgaaggtattaaatattgaagcgctgaccatgctcgacatggcaaagaaggatattcttccgggtgtttcggcctatgtaaaagagctgaccgaaacggctaacgcgaaaaaagcgctttgcgccgatattccgtgcgacgcggaaatcgatttggtcaaaaagctttcttcgctcacggtatgcttttcaaagaagattgctgcgcttgagcaggcgctgctcggcaccaaagaggtcgaaggcgtacaggagctcgcggattattataaggaccatgtgtttgccgccatgcaggagctgcgcgcggtagccgacgaaatggaaattaacacctcgtcaaaatactggccttatccttcttacggacagctgctgttcggcgtatacgactaacctttcttagtacccataggtattaagaaaatcgccgggagaccggcgtttaaataaatgacacaacggcgtgtatttcatactgggacaggaagcgagagctttgcggttggtatgaatacgcgccgattttattttcggggaggaattggtatgttcccaaacatggaattttctgctgttaacacaatatgggttctcgtaggcgccgcattggtattctttatgcaggcgggctttgcgatggtggagacgggcttcaccagggcaaagaatgccggcaatatcatcatgaaaaacctgatggactttgcaatcggcacgccgctttactggctggccggctttggtattatgttcggcacctcgaacctctatttcggcggcttcgactttttcgggcttaccggcgattattcggcggtgcttcccgacggcgtcccgctctttgctttcatgattttccagacggttttctgtgcgacagccgctacgattgtatcaggcgcgatggcggaacgtacaaagttcagcgcgtactgtatttattcagcggcaatcagcctgattatctacccgatttccggccactggatttggggcggcggctggctcgcggggctcggcttccatgatttcgcgggctccacggctgttcatatggtcggcggcgtcgcggcgcttgtcggcgcgaaaatactcggcccccgtatcggaaaatacggcagggacggaaagcccaaggctatccccggccacagccttacactcggcgcgctcggcgtgtttatcctctggttctgctggtttggcttcaacggaggctctaccgtgtccatggaaggcccggccatcttcaacgcgggcgaggttttctttacaacaaacctctgcgcggcggtcgctaccgtcacggttatggcaattacctggattcggtataaaaagccggacgtttccatgacgctcaacggcgcgcttgccggattagtcgccattacggcgggctgcgacacggtcgacccgtgggcggcggcggtcataggcattatttccggcttcgcggtcgtattcggcattgaatttatcgataaggtttgtaagatagacgacccggtcggcgcggtcggcgtccatggaatctgcggcgcgctcggtacgctctgtgtaggactgttctcaaacggctacggcactggcgataaaaagggcctgttcctcggcggcggctttgaggtgctcggcacacaggcaatcggcgtgttctcggttatggcgtatgtcgcggttgtcatgattgccgtattcctcatcatcaagcatacggtcggtcttcgcgtttcgaaggaagaggagacggtcggcctcgatattatggagcacggccttgtcagcagctatgcggactttatgcctacggtcgtcagcagcgcttcccttgatgacccgtctatgagcgttacaggcgacgtttccgtaatggacgccgtacccgtacaggtcgcggcagccggcagcgtccctgcttccgacgtgaagcttacgaaaatcgacatcctgctcaagcagagcaagcttgaagaactcaagaccgcaatggacgccatcggcattaccggcatgacggtcacacaggtgctcggctgcggcgtacagaagggcaaagcggaatattaccgcggagttcctgtcgagatgaacctcctgccgaagatgcaggtagaaattgtcgtcagcaggataccggtacagacggtcatcgacgcggcagtcaaggcgctttacacgggacacatcggcgacggaaaaatctttgtctacaatgtggaggacgttatcaaggtccgcacaggggagagaggctatgctgccttgcaggatatagaataacaaagcctgtccctattattcacatataggaagccccgtccgagcggttgagcacgggcggggctttcctttttgtatgccatttgtggtatggaaaggccaatatccacctatagggaaaaagcggcatacttactttgaagcaaagggatgggagtttttttcatagaaatgatgggaaacgccataatgctgaaagcgtttatattccagcataaaacgccccgcagagaaacctctgcggggcgttttttagaattgttttatttgagataggtgccgtttgttccaatcttgccgtcgattcccgtaaagccgttagaagagagtacgtaaaccctcatgttgcccttaccgggagcggagatggaaagcgtgccgttcgttacgttctttacgtcgcccgttacggcgtcgatgtacttaccgttggggatattcgtaaagttcgcggagcccgttacgcttacgcaagcgaagctgtccacaccgtcgcctgtgaagcggcgcttgtaagccatatcgccggttacgttatcggtcgaatactggcccttctggagcgcggggattgcgcgcctgatttggttgagcctctggatatgctttgcaagcgggtagttgagcgtgtcggctaccgcgccgctcgctgtgtattcgctgaaatcggtcgctgtaacattgccttcgaggtggtcgccgaagtaggcgcgtcccgtagtggaaagcggtgcattcgggccgacgtctatgacctggcccttctggaattcgatttcactgccgtaatagaggcaggggattccgcggaaggtaaagataaggttcaggttttccgcccatgcctgcgtaccggaattatacctggtcgtctggctggagtcggggccgtagtcgtgggaatcaacatacatgacgttccaggtggaatcgttgatatactggtcctcagcaaggccggcgcggtaagcttcctgcgcgttgtcgaagttccagtgcatcgagaaatcgatgacgcccgtgccgttcgatttgctgtagtcgggcgtatggtagttgttgccctttaagaaagcgttgtcgctcgtttcgacattctgcgtattgttgtgcgcgtcgtaatgcgcatatgcgttttcatagttggattcccaatccgttgtgctccagttgttcttccactggctttccgtttccgcccaggtgaagaacgggggggagctggagggaatgttgtggttccatacgtcgcggacacgcgcgcagacctcaccgaagatatagaaattatccacctttttgaataccgggaagtatgcggagttgagcgtccagcggttgatatgcttctctgtgtcgagacggaaagcgtcgacgcccatattgacgtaatccatataggagctggtcaggaaggtcgcaacctcctggttttccgtattgatatcgacgcagtcgcccgccatctggccggtctgctcaattttgctttcataacccatgtcgggtgaatgatggtaataattctttacgtcatgattcttgccgtcggtatttttcataatagcaagccttgcctggtactgtgcggccggcgtcattgaatcatagttcggataagactttacgaattccgaaccctcaatcgggaccatgctggagatgttggccaaatcctgcacattttcatactttttctcaaacatcggggcaaggaaggcttcgccgaaattgcccgtgtggttccacacgacgtcctgtacaatcttcatgcccttttcatgcaccgcgtcgattaggtcctggaatgacgcgccgtccgactcgtacctgacgtccaccgtgttgaagtcgaacgcgtggtagccatggtagtcatagccgctcgcgttcgttaccaccggcgtaatccagattgcgctgaagcccagcgccttgatgtagtccagcttgtcaatcaagccctggaagtcgcccctccacgccgggtcgctgtccgggttgcccgcctggctgtcgtcccagcagtgcacgttgttccctgtgtccccgtcgtagaagcgcgtcgttatcacaaaataaatcgactcttccctgaagtccgtcctttccggctcgtccaggctgtccgggttctttgtgtaccagcggttgttcgcgtaccagtactcgcccgtgttcctcgtcagctccttgctctgctcgccgtttacgatgaacagcatgttcaccttcgtcaggtcgttgaacgtgtacgtgtaccagtccgtcccctgcgccgtgtcctttgtcatttgcttgccagggtactctgtctctatgttcaccgggaggctgttccagtaataaatatacggaaccgccccagcgctcttgtagtgtacgatgattttgctgccggaaccggctgccgcctcttcctcgcctgcctgtgccgcgctcgccgtgaagaccgctcctgtcgccaggactgcaatcgccaaaagcagcgcgataatctttcttgccttactcatttcaattatccctcctgcttaaagctctgcgattttcttcgctaagtaattctgtatcttcagtacgtccgaaacgtccactttaccgtcgtccgttacgtcgcctgccttcagctggtcttccgacagcgtgatcatcttcgcaaggtacttctgtatcatcagtacgtcgctcagctccaccttgccgttcaaatccacgtctccgcgcagtatcgtatccggcttctccgttaccgtgaagctcatcgtcttctctgccgtcttgccctgcgcgtcgcgcagcgttaccttcagcgtgtagctgcccttgctctgcggcacccagccgtagctgttcgtgggcgcgtagtcccttacgaccgtcccatttacgctgaaccggtattcatatggctgtacgccctgcgctccctgcgcactgagcgttaccgccgtgcctgccggcaccggcgacgttacgtttgacgtaaagctcttgacgatggggtcctccaccggcgtcagctgaccgacgctctcatatgtaaacgtgcgttccaccgttgtgttcgctgagttctgcaccgataccgttaccgtatatgtgcccttctgcaccggtgtgaaggccagggtgtttcccgtcttgtaataaacagtattcaccgcgctgccgttcggcgccttgaccgcaaccttgtagaacagcaggttcgtccccgttacgccgcccgcggcctttacattgattgtcgccggcttgtttacttcgagctcagagccgtccgcgggcgttactcccttgagcaccggctttacgctcgtcctgtcgtcctcaatcacataagggctgattgtgcgcgagttcgtgttcccctcgctgtcctttacatcgatgatgattgaatatgtccccggctcatccggcgtccataccacgctgctttgtgcgctgtagtctgaaagaaccgccgtcttcgtcccgttctttacgctgaatttgtactggatgtccccgcttccgcccgcggcggatgcggataccgttatgtccgtctccctgtactgcggggatgcaaggtccgtcgatacgtccttgaactgtaccttgctcgtatcgtagatttcccaggagccgtccttgttgttgtaaatcttgtgctcgcccgctttgattaccagatccgggctctgcgactgtccgccgttgctgaagattacgccgcctcccagatagctttccgggatgaacaccacgtagttcccaagcgcgtccttgtcgctgtccttaagcgctgcgccgggccacccgctgttagacgtgttggcgtccttccagtagtataccgtcgggtttgtccagctcgcgtcgttcttcaggtacgcgtacgcgccctcgcccgttaccggcgggtttgtcggcgtcgtcggctgtgttgggcttgttggctgtgtcggcacctctccgcctcccgcataggcgctccatccgccgtttacggccttgcccgtatccgttccgcttaccttgaagattttgtttccgccctcaaacttcaaatcgactgtctggtggctttcgtttccattgttgaagatgaccttgtcctcgtttccgggcatggtgtacgcgtatacattctcttctccctgtaccgccgtcatctctgttcctggccatgctaccggccctgcggagccttcgctccatacgtagcagcgcggggtcccccagctgccgggtttttcgaagtagattacgtcgccgcttgccgcgcctgcctgtgtggaaacgtttacaaacattactgcgaaaacgcttaccagcatcagcacgctcaaaagcacgcttgtgtacttcgtccctttctttaccattttctcaagcctcctgctttaatttctagcagtttcctgctaacccttatattatataagaaggacaaaaatttatgatgagattaacgaattttagaatgtccttcctgcacaagatttccagatttgttttatgcattgtcacgaaaaaatttatttggttcaagcaaggctcaaaacgtttttttccgtaaccaaaaggaggcttttttattttggaatcccttgacggaaacgggaaagaaaggtatgattagaacaaatattcccttttgatatcacacagaaaggcagtgaacatatgaacactcctttagcggagcgcctgcggcccaaaacgctcgacgacgtggtggggcagacccatctgctcggcgcggacaggcccttgcggcgcattataaattccggcgaaatcccaaacatgatattttacggcccgtcgggcgtcggcaaaagcacgcttgcatccattatcgcgctcaaaaccaaccggaccctgcgcaagcttaacggcacgactgcctcgaccgccgacatcaaggaggttgtcagccagctcgataccttcggcgggatgaacggaattttgctttaccttgacgaaatccagtactttaataaaaaacagcagcagacactgctcgaatttattgaaaacggcagtatcaccctgattgcctccacgacggagaatccgtatttttacgtatataacgctatactcagccgctgtacggtgtttgaattcaagcccgttttaaaggaggaggtcgccaaggccgtatggcgcgcgttcgacgttgaggcggaggaaacgggcgacaacatagacgtggacgacgagaccgtcctgtatatcgccacggcatgcggcggggacgtgcgcaaggcgatgaacgcggtggagctgtgcgtgctcgcgtcccccccgaaggacggcacgcgggccgtcacgctcgaatgcgcaaaacagcttacgcagaaaagctccatgcgctacgacaaagacggcgacgagcattatgatatcgtttcggcataccaaaaatcaatgcgcggctccgacgcggacgcggcgctgcattacctcgggcggctgctcgcggcgggcgatttgccgtccgcatgcaggcggctgatggtttgcgtatgcgaagacgtggggctggcgtacccacaggctatcccgattgtcaagtcctgtgtcgatatcgccctgcaggtcggccttccggaagcgcgcatcccgcttgcggacgcggtcgtgctcgtatgcaacgcgccgaagagcaattcggcctataacggaatcaaccgcgccatgcaggatatccaaagcggcagggtcggcagcattccgcgcacgctccagaacatgcattacgacggggacgacgtcaaaaacaagggccagttttataaatacccgcaggagttcccaaaccattgggtcaagcagcagtacctgcccgacaatcttgtgggcagcgcctattacgaatacggcgataacaagaacgaacaggcgtttaaagcttattgggataaaattaagaaataagttaaaatcatcccgcagggcgccggtttgctctgcgggattaattttccgtattgatatattgctttcctattatcaattgttactaaaacggaaaaaatatatctgtaaaattgcacaggatgaaatttctaataaatcaatataataaatcacaatattgtataattctatttgtggataagggataaattttatcccttcctccaatattaaagcaggaggcttgagaaaatggtaaagaaagggacgaagtacacaagcgtgcttttgagcgtgctgatgctggtaagcgttttcgcagtaatgtttgtaaacgtttccacacaggcaggcgcggcaagcggcgacgtaatctacttcgaaaaacccggcagctgggggaccccgcgctgctacgtatggagcgaaggctccgcagggccggtagcatggccaggaacagagatgacggcggtacagggagaagagaatgtatacgcgtacaccatgcccggaaacgaggacaaggtcatcttcaacaatggaaacgaaagccaccagacagtcgatttgaagtttgagggcggaaacaaaatcttcaaggtaagcggaacggatacgggcaaggccgtaaacggcggatggagcgcctatgcgggaggcggagaggtgccgacacagccgacacagccaacaagcccaacacagccgacgacgccgacaaacccgccggtaacgggcgagggcgcgtacgcgtacctgaagaacgacgcaagctggacaaacccgacggtatactactggaaggacgccaacacgtctaacagcgggtggcccggcgcagcgcttaaggacagcgacaaggacgcgcttgggaactacgtggtgttcatcccggaaagctatctgggaggcggcgtaatcttcagcaacggcggacagtcgcagagcccggatttggtaatcaaagcgggcgagcacaagatttacaacaacaaggacggctcctgggaaatctacgatacgagcaaggtacagttcaaggacgtatcgacggaccttgcatccccgcagtacagggagacggacataacggtatccgcatccgccgcgggcggaagcggggacatccagtacaaattcagcgtaaagaacgggacgaagacggcggttctttcagactacagcgcacaaagcagcgtggtatggacgccggatgagccggggacatattcaatcatcatcgatgtaaaggacagcgaggggaacacgaactcgcgcacaatcagcccttatgtgattgaggacgacaggacgagcgtaaagccggtgctcaagggagtaacgcccgcggacggctctgagctcgaagtaaacaagccggcgacaatcaatgtaaaggccgcgggcggcgtgacggggacgaacctgctgttctacaaggttgcggtcaaggcgccgaacggcagcgcggtgaataccgtttattacaagacgggaaacaccctggccttcacaccggtgcagaagggcacatacacggtaacggtatcggtgcagaactcagcgaacacaacggtggaacgcacgtttacatatgagagcgtcggtcagctgacgccggtggaggaccccatcgtcaagagctttacggcgaacgtaacgtcgccggtaccggcaggcacggcggtaacgctcagtgcgcagggagcgcagggcgtacagccatatgaataccggttcagcgtaaatgggacggtcgtaagggattacgcgcccacgaacagctacggctgggtgccgcagagcaagggcagctacacgctgaaggtaacgctgcgcgacgcgcagggcaagacggcggagaagacgatgagcttcacggtaacggagaagccggatacgatactgcgcggagacgtggatttgaacggcaaggtggagctgagcgacgtactgatgatacagaagtaccttgcgaagatgatcacgctgtcggaagaccagctgaaggcaggcgacgtaacggacgacggtaaagtggacgtttcggacgtactgaagatacagaattacttagcgaagaaaatcgcagagctttaagcaggagggataattgaaatgagtaaggcaagaaagattatcgcgctgcttttggcgattgcagtcctggcgacaggagcggtcttcacggcgagcgcggcacaggcaggcgaggaagaggcggcagccggttccggcagcaaaatcatcgtacactacaagagcgctggggcggttccgtatatttattactggaacagcctcccggtgaacatagagacagagtaccctggcaagcaaatgacaaaggacacggcgcaggggacggactggtacacgtacacgttcaacgacctgacgaaggtgaacatgctgttcatcgtaaacggcgagcagagcaaggagctgacgaggaacacgggcgagtactggtacgcgaacaaccgctggtacacaaagaacccggacagcctggacgagccggaaaggacggacttcagggaagagtcgatttattttgtgataacgacgcgcttctacgacggggacacagggaacaacgtgcactgctgggacgacagccaggcgggcaacccggacagcgacccggcgtggaggggcgacttccagggcttgattgacaagctggactacatcaaggcgctgggcttcagcgcaatctggattacgccggtggtaacgaacgcgagcggctatgactaccatggctaccacgcgttcgacttcaacacggtggacgtcaggtacgagtcggacggcgcgtcattccaggacctaatcgacgcggtgcatgaaaagggcatgaagattgtacaggacgtcgtgtggcagcacacaggcaatttcggcgaggcttatttcgcgccgctgtttgaaaagcagtacaccacgctcaaggatttggagagcatcgaaacctcgatgattccgcttcctgaaagcgggctgggcacagcggaggaatactattcccagacgccggccgtccagtacagcacgcgtctcgaccgcatgaagcaattaaaaacaaactcccagaacgacccggttaaccccaacggcgatatcggcaatatggataaggtatccacaagcgatacctataacccccacaactactatcacaacggctactggcagagcctcaactgggacgactggtcctgcaaatactgccaaatcgcgggcgactgcgttgacctcaacacagagaacccggacgttgcgagccacctggtagacgtttacggcaactatatcagcatgggcgtcgacgcattccgtgtcgataccctacggcatatcccgcgcctttccatgaacacgatgtttgccgaccagttaaatgcaatcggcggaaagaatttctacatgttcggcgaggtctgctgccgttatacgcaggtctggtaccgcgaccacgcgagtgaatcggtccagttctacacctgggacgagccggacagctcctacacgagccagtggaactgggaaaatacgccggagaacgtcagcaaaaatatggatttgacgctcaagcactggcaggaatatgacaatgtcaacaagcagcctacaagcgacaacgcgtttttgaagggcaacaattaccatgcgccggactacagcaaatcctccggcatgggcgttatcgatttccagatgcactggagcttcgacaatgcgcagagcgccttcaacatcgcaaaggccggcgacaagtacttcaacgactccacctggaatgtcgtttatgtagagtcccacgactacgcgccggacgctgaccagaaaaaccgctttacgggcggtacgcagacttgggctgagaacatgaacctgatgttcaccttccgcggaatcccctgcctctattacggcggcgaggttgagttccagaagggccaggtcatagacgtcggcccgaacgcgccgctttccactacgggacgcgcctacttcggtgattatctggagggcgacgtttctgcaaccgacttcagcgaatacacagcaagcggtacggtagccgacacgctcaactacccgcttgcaaagcatgtgcagaggctcaataaaatcaggcgcgcaatccccgcgctccagaagggccagtattcgaccgacaatgtaacgggcgacatggcgttcaagcgccgctatacaggcgacggtgtggacagcttcgcttgcgtaagcgtaacaggcgccgcgaactttacgaatatccccaacggtaagtacatcgacgccgtaacgggcgacgtaaagaacgtaacggacggcaagctttccatccctgcctccggtaagggcaacatgagggtttacgtactctcttctaacggctttacgggaatcgacggcaagattggaacaaacggcacctatctcaaataaaacagtaagttggaatgcaatgaaccggcgggatatttcccgccggttttacctttgctgaaagaggatatggtagtgatgaaaaaatttcacaaaaaattctgcctaagtttgtttctggtataataaatatagaattatgtggatggacaaggccgcgcctttccctttgagggaaggcgcggcctttattttttatgttgttaacggcatccactatgaaatgcgccgtcaaatcctttttttacggaacagcagcacgctcagtactgtaaataggacggttcctcccgccgcgaagacaatcgggagagtgaaatcgcccgggggagctcccgcgtttaagagcgccgcacagcccgatgcaagcattacgggattaaccctctgcgcctgcggcaaaatattcagaaggaaaagcgcgccggtaaagccagcggtaaggagcaggctgccatagctgtttttaaacagcacgccgccgagaaaggcaaccgataaaagcaaaacgccgaacagccaaaggcacagcgccgctaagcctaagcctgtaacgcgctcccccggaaaaagaaacacggtataaccataggtcacgccaaagcacagaaggtaagcgccgctccaaagcaaaatagagcataaaagctttgcaagcgccacgcttgaacgcgtaagccccttagtcagcaggtttacaagcgttccgttttgcagctcgcgcggcagcatgccgctgaacacgacgacaagcacgattaaaccaatttgggggacatttttaaaaaactggagataggagtctaacgcctgcggctgcgcgagcgcaatcgtcatgccctctggcatcatcgcgtttacaagctcgggcaggaatttcgcggaaagggggttcattatgcctagcaggaggaacaccgcgccgagaatcaggattcggtaggagcgcagcgcttccacccattcttttctgagaaaagccgcaaatccgttcattttaccgcctccataaaaaggtcctctagcgccggctcaagcgtttcaagccttagcggctggacgttttgccgagaaagcgcatcaattatatgcgactgtgtaccgcgcgggtcgtccgtttttaaacggagggagcactctgtctcccgcgcgccgagcaggagggggcgtaccgcttcatcagcggagaaacgcgatttatcctccggcgtataaaaatcgatgatgaccgtatgcccggccgtatgagatttgagttctgatagcgtgccgtcgcatatcagccgcccgccgttcaggatagcgacgcggtcacagacgcgctcggcgtccggaaggatatgcgtggaaaacagcacggtcgtttcagccctgacgcgctctaagatagaaagcacgtcgttccttcctaccgggtctaacgcggacgtcggttcgtcacaaattagcagccgcggggaagacagcagcgcctgcgcaatgccaaggcgctgcttcatacctcgggaatacccgccgatgcgcttttttctgtttgaaagccccacaagctccaaaagctcaaggctttttttctgcgtttgcgccctgccaagccccgaaatccttccgcacagagccaggtattccatagcgctcatatacccgtaaaaggcagggacatccggcaggtacccgaccatgcggttggtttttgtttccccgtaggtaacgggttccccgcagatggtaatttttccgccgctgggcctgagcaggccgagtatcagcttcatggccgtggtcttgcccgcgccgttttgcccgagaaaaccgtaaatacagtgttcgggtacgctgagtccaagcccgtcgagcacggtaaagtcaccaaaacgcatttttaaattttctatggtcaggatattcattcttcttcccctttgccaaagataaagtataaaaccggcccgattatctgcacaaacagcaccacggcaatccacacgggcttgctgccaaaccggtaatgcggatggcgtattacatgaacgagcgccgtaatcgccagagtaagctggatgattagtaccggaatcaaaagcggcaggtatgttaatatttgttccataaaaacacctcatttttcagcggagccgagcttatccaggatgctttgaaaacgggggtcctgcttaagcggggcaaacgccggattttgtacaaccacatcggttatgcttttgcgcactgttttttcatcgcgcgggattagcgtaccaagctcaaagctttcaaaccaactgccgagcaggtcaaaatagctgtctccgtgcagctcgagctttgcaggcagctcctgaacgagggagcagtaccttttcagcataccgattgcctgctccgtctttccgagcgcgcagtagccctgtgccgcggtaaggacaacagatagcagtatggtgggatggagccgctctacctggtacaaatcgcacagcccgattgtacggtggacgatttcctcaaatttgtccgggtcgtccaggtacaaggaaaagaaaacagacgcgccgtctattaaagatatgagatgctggtaagcgcttatctgcatggtttcctttgctttttccggtttgccgagcagcatatatgcgtttgcaagcagcggctccggcgaaagcatggggacggtcgagttttccagcaggccgagcaccggttccggttccttgagcaaaatctggcagagggcctccatgtggatggcctgccggcacagctcgacgtcgccgctttcctccttaatccggataaaaagcgcgcggcattctttaaccagctccccctgcctttcctgtccggcaattgttatgctgtagttgataagcagcatggccatctggaacagcaaaggaaagcaggagtaatattttttgataatgcagcggcattttgcaagtacctggtcgaacggctcgcttgcaaattccccgcaaagcttacggtacagcttgcggatatcctgtgtcgtcatctgcggctcgtagcccacgagctcgtcgatactgatattaaaataggcggcaagctgggggagaaaggtaatatcgggatagctttgccctgtttcccatttggacacggacgccttcgacacgccgatatatgccgcaagctcttcctgtgtgacgcccttttcccttcgccgcgttaaaattgcttctgcgatatggagttctttcatataaccacccctttctcttcattatatggatttataaagggaattcaaaggatttacagttaactttccttgacaaaatcaaccattgggaaacgcatacgcaaaaaggccgccggatatccggcggccttccaagtatatttgttacatgctttcaggggcggtgatattaaacatctcaagcacgttatggatgactgtgcgtacagcggtgcagagggtgagccttgcctgtgtcaggctttcatcgtctcccttgaccctgcacgcattatagaatttatggaacagcgaagcaagctgcaatacgtagcgtgtgatttttgtggggtcgtaatcgcgcgccgcggcaatgatttcatctgtgaacgcggcgagatggtgaattagctccctttcctccggcgcgtttaaaagcagcagctcttcatccgtgcagcggcgctgtgaaacgccgtccgcggcaagcgccttaacgatgctgcaaatgcgcgcatgcgcatattggacgtaatacacggggttttgggaatcctgcttgactgcaaggtcgaggtcgaaatccatctgggtgtttgcctcgcgcatattgaaaaagaagcgcgccgcatcgaccgggacctcgtcgagcaggtcggcaagctggattgactttcccgtgcgcttgctcatcttgacgggcttgccgtcgcgcacaagcttgacaagctgcatcagtacgacgtcgagcctgccgccgtcaatgccgatggcttccatggcgcccttcatgcgggcgacatgcccgtgatggtccgcgccccatacgtctatacaaaaatcgaagccgcgctctaagagcttattgcggtggtaagcgatatcggctgcaaaataggtggggttgccgttctggcgtacgagaacgtcgtccttgagctcaagcttatcgatttcctcctgtgttttgcccagcgcaagcaggcgctttgtctggagctccttgtttttataccacagcgcgccgtcctgttcgtacaccatgccgtttttctttaaaatcccaattgtttcatcgaccgcgccgctttcatgcagctcgctttcaaagaaccatttgtcgtaggtgatacggtattttttcatatccgcctgcattttttcaatgttgcgcggcagcgcaaagccaacaagcgccttcctgcgttcctccgaagggcgggaaagcagactgtctccgaaggcgtcggcatactcctgcgcgcgctctctgatgtccgcgccctggtatccgtcctcggggaaggggacgttatcttcgcccttgaatatctggagataacgcgcctcgagcgacaccgcgaatttttctatctggttgcccgcgtcgtttacataaaactcacgccagacattgtagcccgcggcgtccagtactgccgccaggcagtcgcccagcgcgccgccgcgtgcgttgcccatgtgcataggccccgtggggtttgccgaaacaaattccaccatcacctttttgccttcgccgtaaccggaacggccataatccgcgccttttgtctcgacgtcgcgcagcacatccgcataatactgcggcttgtagaaaaagttgataaatcctggtcccgcaatctcgatacggccggcataggtgccttccaggtcaaaatgcgctttgattgcctgcgcgattttaaacggcggcatatgaaaggcctttgcgccaaccatcgcggcgttcgccgcaaggtctccgtgcgcgcggtccgccggcatttctatgataaacgccggcagctccgcctgcgggagctcgccctgcccgattgctttttccactgcgtttttaattccggcttgaatttcggctgccgccttctttgcaatctctgacataatatttcaccctttgtacgtattttaaacttccgcagcgcccgcgcgcttgacatcgatatggaattcgttccggcttgcaaggtctgaattgaagtcgagcgagtagcttacgtcgagcgtgccgccctcgtcgtcgagattcatggcaatgcggtcggtaaacacgccgatcatcaaatcgcccgcaagcgtcctgtaatggcactggtgacggcgcccaagctctaaaagcaggcgcgactcatacagccccgggcggataatagcaattttcccgccgctttccaccttgacgattgtcgtcttttcctggccgctgttttcgtcgtcgtattccttatacataatataacggtgcccgtttttctcggtataatggccgagcgtcatgacctcgattttatcctcttcgctgtctataaactgctttccaacaatgttgataacaaaatcctgccgcatgatttctccttcttagcccgcacaggggaaatttacctattcgtattgctcaatatcgatgcgtaaaacatcctctttgatttcccggtttaaaaacataccggcaatatgtgaaaagccctccggcgtgtcgctgacataaaagctgcacctgccagccttttgccctgtgttttgcaggccgcgctcctttaactgctttgcggcatagagcgccgtttccctgccggagtcgattaaggccgtattttctcccataacatcagaaataacgtcccgaagcagcggataatgggtacagccgaggataatagtgtccgcccccacagctttaagccgctcgagatagtgctttacaaccatgaccgcaatcgggtcgtcccgcctgataaagccgttttccacaagcgggacaaaaagcgggcaatcctgctcatagacgcgtattttgttatctaagcgctctatctcccttttataggagccgctccttatggtggcggtcgtgccgattacaccgatttttccagttcgtgtagcgtttgccgccgcctgggccgtcggcgcgacgacgcctgtaaacggcacggcaaagcatccgcccaaatcacccgcgacagagctgacggttccgcaggcggcaatgatatacttaacgtttttggatagcaggaattgagcgtcctgctttgcgtatttcatgatggtctcccggcttctgttgccgtagggcaccctgcccgtatcgccgaaatagacaatgtcctcattgggcagtacatgtaaaagctccttgacggcggttaagcccccaaggccggaatcaaataccccgatgggatcgcatgacataagcgtgtaagccccctgtccggaattagcgccgcgcaagcggcaatatctaaattcatataatagcatagaatcatccgtcacgcaataaaaaatagttattttttcagccggtaacgtcttctccataagctgaaaaccgcatggttgcttggctcctgtaatatgtaaagcggcaaaatggtgccgattgtgacagtaacatgaagttgtgatacgaaatgagctgtttgacatttccgcacgctgatattagaatggaaagggttaagttgtgtttgtttttggcagaaaaggcagggtagtggagggcgtcttgatgtttaatgaaatctgtatttatgaagcaaaaattgacaagcaggatgaaattgaagctctgatgaaagaggtcgcagaattttatctttcgcagcccggagttattgatgtaaagtacatcaagcgtacccatcggcaagaggacttccatgccgtgaaagaggggaagccgcccattcgcctgacgaaatggataggcaaagtcacttatattttgcactggacacttgaaaatgaagacgttcatgcacaagtgtccaagctcggattggaacagttttataaacgttggaatcgctgtcttactaccatgcctaaaatactgcttggtgagaatatcgtgtaggtatcttcttgaattaaggcacactacgctatatttgttttcaatagtggctcgtagtacacacgaaacgatttttcactttttcgtcttcgcaaaaacctgtaaaatctgctaatggatatttcaataaaatttctcgtgacaaacctgcaatttcgctgtataataaatcagaataagcggaaaaactgaggttaggaatgatttgatgttagaaaaggcttttcaattaataagcgataaagtggaagaggcgctgaagcagcagggctttgaacgcgtcggcgtatccaatacggacagcagcgaaatggttacgctctatacgtcggaggccatcgcgtacagcgtcgtctattataaaaggaagaagcacatggtgcttgaaacgtgcggcatgacggacgaaggcccggataacgactggaagacgctcgctacctggatgttcgaccctgaaaccgatacggaaaaagacgcccagagtatcgctaacgactttatagataccatagccgcgcctgtcaggaaaaaggcgacaaagggcgcaaagaaaaagaagaaggacgaggagggcaacgccgacccgctctttttctctaaaaggcttttcagcgtgttccctgagcttaaggaagaggttaagtccgaagaggactgctatgacccgttccgcggcgtgacctttgccaaggccagcatcgtcccaaaggtaaacgagctgctcaagtccggctccaagcaggacattaccaagcttgccgccgttttaaacgcgcagtacgatgcgggcgacatggatacgcgctccattattacaatcgttatcctcaatggaatcgagacaaaagagcaggaggacgccctgcttgcagagctgagcgataccctgcaaaaggcctggggcaacgccaggcgctttaaaggcaaagcggtaaagcctgaaaaaaagaaaaagccgaaaaaatcatttgtgcctacgctgaaccagtaatgaaaatcagccgccgccggataccgctaaggtccggcggctttttgctttttcccttgactggaatattctgccgggctgcttacgccaaactgcataaagttgaaaaaatccttgacgtattgtaaagattatgatatagtattactacctcaaaaaaggggtttatttttttgtacccattttgagggaggctgaataaaaaccgcaaatcgggggtgccgttaaaaatgagagtaaagattacattagcctgcacagagtgcaaacagcgtaactacaacacaatgaaaaacaagaagaacgatccggacaggctcgagatgaacaagtactgcagattctgcaaaaagcatactctgcataaagaaaccaaataacgcagcggagggaatgacaatggctgaaaaaagcgccgagaaaaaggttccgaacaagtccgaaaagaaatcggacaaaaagccgaacattttctctagaatagcgaaatacttccgtgactgcaagggtgaaatcaagaagattacttggccggcaccgaaaaccgtgtttaaaaacatgggtatcgttctcgtcgtaatcatagtaatcggcctgttcatcttcggactcgaccgcggcctttacgcgctgcttggtctgattatgaatgttgctacaacctaatagacacggaagggtggatgacaatgcctgaagaagcaaaatggtacgttgttcatacctattccgggtatgaaaacaaggtcgcttccaatcttgaaaaaactgtggaaaacaggggacttcaggatttgatccaggaggtcaaggttccgactgaaaccgtggtggaaatcaaagatgaaaaaagccatgaggtcgaacggaaaatctatcccggatatgtatttgtcaaaatgatttgtaccgacgagacgtggtatgtcgtacgcaatatccgcggctgtaccgggtttgtcggtccgtcctcaaagcctgttcctctttctgatgaagaggtcttgagaatgggagtggaaaccaggaatattgaggtttcctacgatgtaggggattccgtgcgcattatcgacggtccgcttgaggactttgtcggaattgtggacgaaatcgataaagacaggaacatcgtgcgcgtgaccgtttctatgttcgggcgcgaaacgccggtcgagctggagcttgcccaggcggagccgatggaataagaaggttaataatccggttttccggttattatggaggggcaacgccccttgtgggaggaacgattaagagcaaccgttccgctgttgaaccacgaattatggaggtgcaaagaaatggctcaaaaggtagtaggctttatcaagctgcaaatacctgccggtaaggcgaccccggcgccgccagtcggtcctgcattgggacagcacggcgtcaacatcatggcgttcacgaaggaattcaacgagcgcacaaagaacgacgcgggcctgattatccccgtcattatcacggtttacgcagaccgttcgtttacgtttgtaacgaaaacgccgcctgcggcaatcctgattaagaaagcatgcggaatcgataagggttcaggcgtgccgaacaaaacaaaggtttcaacgattacccgtgagcaggtcaaaaagattgcagagcagaaaatgcccgacttaaatgccgcgaccattgaaacggcgatgagtatgatcgcaggtactgcgcgcagcatgggcattgatgttgtcgattgattaagcccgggtgggaggaaataatccgattttaccactcaatagggaggaaaaccaatgaaacacggtaaaaaatacgttgacagcgcaaagcttgtcgacagagcaaaattatatgacactgacgaggcgctcgacgtctgcgtcaagacggcgaaagccaagtttgatgagacggtcgaggtccacgtaaagctgggcgtcgacagccgccacgctgaccagcaggtcaggggcgcaatcgtcctgccccacggcacaggtaaaaacgtccgcgtccttgctatctgcaagggcgaaaacgaaaagcttgcgcaggaggcgggagccgactttgtaggcgcggaggatatgacgcagaaaatccagagcgaaggctggatggattttgacgttttgattacaacgcccgacatgatgggccttgtaggacgtctcggtaaggtcctcggcccgcgcggactcatgccgaacccgaaggccggcactgttacgcccgacatcgccaaggcaattaaagaggcgaaggccggtaaaatcgagtaccgtctcgacaagacaaatattatccactgcccgattggaaaggcttccttcggcgcgcagaagctgcaggagaacttcgataccctgctcggcgcaatcgtaaaggcaaagccgtctgcggcaaagggacagtatatcaagtcctgcgccgtaacgaccacgatgggtcccggaatccgcatcaacccgaacaaggtcggcggacagagcgaagcttgatttcaggcatgctctatcgtacgggttgccgtacatttaaaaaggtacttgacagggcgcctgccctgtggtagtattatacacgctgttcttttcctaagacagcaggcgcattgtgcgtaaaggttttacctgcctgccgaggtttagacttgtgattgttataaagctttcttacgctttattgtgattttaagtcccctctgcaaaatgcaggggggcttcttttatgcattatcctttatttggaggtgaattcattttgccaagtgagaaaattctcgaacaaaaaaaggctatagtcacagagttggctgaaaggctcaaaagctccgtagcaggcgtgcttgtcaactacaagggtattacggttgccgacgatactaagctcaggaaagagcttagggaggcgggcgtttcctatacggttgtaaagaacacactgctttccagagctgccgagcaggcgaacctcgaagggctcaatcctgttctggaaggaacgacggctcttgcaaccagtcctgaggactacgttgccgccgcgagaatcctttctgggtatgccgagaaaaacaaggatttccagattaaagcgggctttgttgacgacggcctgctgagcgtagaggaaatcaaggacctcgcaaagctcccaagcaaagaggtgctcgttgcgaaggctttgggcgggctcaacgctcccatcagcggttttgttactgtgcttaacggtaatctccgcggccttgcttgtgttctcaacgcaattgcggaacagaagcagagtgcgtaaagctacacaaaattgtgcgtgtaaacgcgaacattaaaattatttttggaggtttcaattatgtctgataaagttgtaaagttaatcgaagatgttaaggctcttaccgttcttgagctcagcgagctcgtaaaggccctcgaagaggagttcggcgtttccgctgctgctccggttgccgttgctgctgctcctgctgcgggcggcgctgctgctgctgaagagaagaccgagttcgacgttgtcctcaaggctgctggcgctgagaagattaaggttatcaaggttgtcagagagattacgggtctcggcctgaaggaagctaaggagctcgtcgacggcgctccgaagaccctgaaggaagctgtttccaaggacgacgcggaagccatgaaggcaaagcttgctgaggttggcgcagaagttgaagtaaaataattcgtttgactgcaaaccggacagggtttctaccctgtccggtttttttcgttttttgccgtttatggttgccgtccctttaaaacaatagtataattatattaatattttggttgtttaaggatgatgtgaatgaatggttcggcaaaaaaactggcatgtctggttacaacggtgctcctggtcacggtgattctcgcggctgtctgtctgaatgcggacgctatgaagagcgtccagccagaaaataacagcctggaagctatgggacaagctgccgtacagggcatggcggtacgcgacgacggaggcgacctgatataccccgaagacctaatgagcgcgggctatatttacagcggcgacggcgctaaacttgaaggggattaccgcagcgtgcgtttttcagcatctgaccttgattttgaaaagaaggaataccgtatcaatgcgggctgttatgtaaccttctggaaaaatcccggcgagtttgcaggcggatatgaaatcagaagcgcgtcgaacgaccatccggcgcagattacccctgtttcagaggggtatgattatatcctgattggcctgctggatgaggacgtgcggatatatgcgctcggcaaaggcgcgcttacggtggattttcaggaaaaattcaaggagagccttccaaaccgctaccggcttcaagatacggtaacagacgccgccctgatagattcctatgagatttccccgtacggcaacctcattgataaacggatgctttccaagggcgccgcgcttctcgacaatggaacagagaaagaggacggcggcattaacgaaagtgcctttgtggagctttcagacaatacggaatacctgctcaattttgaatcctacataacctttttcgatgaaaataaaaattttatcggcggctatacagaggccgcggccagtgtagaatgcccgcaggcgctgaaggacattcctgatgatgcatgctttgtacggctttcggtgaaagcgactgatacggagacggcagtatttgcgcgcaaagactgcttttcaaacagccttcccgcgctctatacgcttggccccgttggagaaagcggcacttatcttgctcagaaggacataaaccccctgtatggaaagacggcggtgttcttcggtgacagcctttgccaagggaaaggggatgcttttggaggatgggcgagctggattcaaagggaaaacccctccatggactgcgtcaactgcggagtagggggctacaccttcctgcagggcagcgaaaaatggtttgacggcggggaaaaccaggcaagccttccggatgacgccgactatattatcatccagggctacaccaatgggatgtacgggaagaaatccaaaaagccgctcggcacaatcgatgaggacgactataccgttacagtacaaaactgcgacacaagtacctattccggggagatggaaaaattcatcctccaatgtttagaccgctggaacgggaaaaagctcggttttattatcagctataaggcggctgcgcatctcgacagcggcaatccgtaccggcagtttaccaaacagatgcttgcgtgctgccggaagtacagcatccccgtcctgaacctgcaggaggaaagtacgattccatgctatacgcaggaggatattgacgaatacttctataaaaaggagaatgcggcgcatggggacggcatccacctcaattcgaaaggcaacgccattatttcttcaaaaattgaggcatggatgaaaacactatagaataatagcaggcaatagacagtttttatattgccaattcatatcaccaaagagcagatatcccaacagccccgcaggcacgccctgcggggctgtgcccttagcagtcgaatgctgcgtataatattgataaaaaaaagaaccggaatggaagaaaaatgttgaattttatccagccggagagtataataaaaatattacggtaggagacctgcctgcatggaataaggaggacttgataatggttttaggaaaaaaggcgttgtgccttgtgctgtccggtatgatggcggtatcagtcgttgtctgcggaaccttgtccgcaggagcggaaatcattaaaataggagatgtaaacggcgacggcgaaataaaagttgcggacgttttgctgacgcagaactttattgcgaaaaaaatcacctttaccgacaggcagaagcttgccgcagatgtaaacggcgaccgcgaggtaaaggtaaacgatgtcctgattatgcagaactttatagcaaaaaatatcagtgaattccccgttcctgatattgaagttccaactgagccgccgactgaggagcctacgcaaaagccgactgagccgccgaccgaggagcccacgcaaaagccgaccgagccgccgaccgaggagcccacgcagaagccgaccgagccgccgaccgaggagcctacgcagaagccgactgagccgccgaccgatgaacccacgaaaccaagcgttacggtcaacggtacgcaggcaagagtgggggatacaataagggtcgtattccacacgaagggagtcaacgacgtggcccaggcgattcaggcttatgttgaattcgacgcgcagcggcttaccctttccggctaccggctcgacacatggagcaattgtatgaaaaacgattccgaaccgggcaggctgtattttacggcgtccgatattgcggcaggcttcccgataacagacgatacggacattgtatcgcttacgtttatcataaaggaaacgaatacggatgtcagcacggacgttgttttgcatgtcgaggaattttttggggaatcaagcggggacggtaattttaaatataccgtcagcgatgcagtaacaatcgaataataaaaaagcggatgcccccagagggcatccgctttttatcaggttttatagggcaagcctgtagatttcttcaatatcctttgcctgcaatacgctgaaattcccgacaggcgccgctttctgcgccatttctttcaagcggctgccgtcaatttgcagctcgcttaaccgaacgggaagcccgatggaggagaagaagttttcaagcctgcggatggcttcctgtataatcgaatccgggtcgccgaacgccatatccacgttcatgacccgcacggcaaattgtaaaaagcgtgtgacgtccacctcgtgctggtatttcatccacgcggggaatataatggcaagccccgcgccgtgggcaatgtcgtaaattgcgctcaattcgtgttcgatatcgtgcgacgcccaatcgccgattcgcccaagcccgaggatgtcgcagtgcgcaaccgtgccggcccacatgatttcggcacgcgcgtcatagttgtccggattagaaatgaccttctgcgcgtttatcataatcgagcgcattacggcctcgcacatacggtcgctgacgtcgacgttcctgaccgtagtgaagtaccgttccataatgtgcgcaagcatgtccgaaatgccgcatgccgtctggaacggcggcagcgtgaaggtgagctccgggttcatgacggcgaactgcggacgaacaagcccatgggaatagctgcgtttgagccatccgtcctcgtttgtaattaccatgcttgcgcttgtctcgcttccggcagcgggaatagtcaaaacaacgccgataggaaggcatttgtcaatcggacggcgcaccttgaacaaatcccatacgtcatgctcgaggcatgcgcccatcgcgatggccttagccgagtcgattacgctgccgccgcctacagccaggacaaaatcaatcttttcttttttgcaaagcgcaatcccttcccggacaagggacaggcgcgggtttggccttacgccgcccagctcaagataatcaatcccgcttttttcaaggcttttggtgatttcgtcatacaggccgctctttttgatgctgccgcctccgtagtgcagcagcgccttcttgccgccgtaccgctttaaaagctcccccgtctggctttgcgtccctttgccgaacacgatttccgttgcgtttttataggtgaaattaaccatctggaatcaactccttacattgtttcaagtaattgcggcgcctttgcggcggtagcaattacataatcttcatgaaatattgtatagctccttgtatccatattgttttcgtatcgccgaagatatttaccgtctgcttcactcttttctttgctttgttaaaactccggtacaaaggcaaattgctgcgatgacagctagcgcgattaccatgatatctgacattggctgtacaaggcggttaattaatatgacagccaataggatgccccatcccaggactataaagaaatttttcatgccaagcctccctgaactccgatatatcatgcgcgcgggcaacacattcccgatatcacaaaagatattagaaatgtacggcttttatactgtgagctttttacccgctttgaggttattatactacaaagatatgcgcattcctatgtttttctttgaaatagggaaaagatatgatataattaccctgtaaatttatacccctgtgcctaaaggcgtggaagaaaggacgggacggtatgattctgcatgacatctctaaaaacatttttactgcgaaattatacgacggggaccctgcgccaaaaagcggttggctttcgcggattgaatacggggaggactgcaacctgtcctccgtcgagctgtgtacgcacaccggcacgcacatcgacgcgccgcttcattatctggaggacggcgatgcaatcgatgaaataccgctttccgtgttttacggcgcctgtaccgtcgttaccatcgaagggcttctgacaggcgaggatatggaagaaatcctcccgttttgtaaaaaaaggcttttgctcagggggcggggccaggcgtttttaacgcagagcgcggcgttcgtgcttgccgattacggaatccgccttatcgggaccgacggcttgtctattgcctgcagggatgaggagtttgaaatccacagggagcttctgctccataatgtcattatattagaagggcttgagcttgccgaaatcagggacggggactatacgctcgccgcgtttcccataaagctttcagggctggaggcggcgcctgtgcgggcgattttgctggaacaggaaaaagggatttaaaaacatccatggcgaaaggatggaaatgtcaatgaaaaaagggataaagctcgtactgctgctgttgtgcgccgtactgtttaccggggtagtatccggctgtgaaaatacaaaggtacaggtggaaaacctcattaatatgaacgcgcagttcaagggcagccgcagcattacggtcaataccggttttgtctttgaagggaaagaggatttaaaggcgcagtttgacgaggcggtaaaagaattctgcccgtctgccttcaagcgcgaggttaaaaacgcggacgacggcctgaaatatatttttaccattgaattcgattcgaaggaagattatatcaataaaatatcctctgtgctcgaccggcaggcaggcgccgcgctcggaacgccggacagcgaccttgcccgcggctggcacctcaaggaggacttcgacggcatggagcttatcaaatggcttcaggacgggattgctgaaaaaaagtacaatgacatcaattttgaatacgaaagcgcttctaatatcgttaacctcggcggggatatccaaagcagccagtcaagccaaatcgatatcaatacggtggagggctaccccgttaccgccgtttcgattgaaacgactaataacaaaaaagacagctacgacaggcgttttacgctctctgtaccgcagtccacctatgaaaagatgggcaagaccctgcagaccattatgcgtgagcgcacggccgcggaagccgtatacagcggctggacgcagcagggcaacaaccaggagttccaggtgctgtatcagggtattacagccgcgcagcttcagcgcgtgacttcgctgttcctcgactgcaaggaatcctctgtttattacggggatgaaaacaacagcagtacgccgctggcggagcagctcgtttttgaagagaatatcgacgtgctgagctttgtccccaaaaaggacggcgaggttgccttttcctataaatattccctgccgctgaaaaccacatatggcgagggccttgttttcagcaagggcgtgtgggaaaagcagggcagctgggttgacggcgtttacaccctcaattcacggaacaaggcgtttaccatgcgtattccggacggtatccagtatgatatcgaagggctggcggtaacgcttgagaataacggctcagacagctacacgcgctcccttgatttcctttacaacaaaaaagatggggaagaggggcgcaattacgcgtaccagttctttaaaaaacagggcgtgtctgtttcgcagaaacaggaggacgacgcgctcatttgccgtattgccatgaagggaaccgcgcagcagattagtaagcagctcgacggtttgttcggcggcggcaactcgctcgaacgcacggaaaatacgagcaccatggcggtcgtaaccgatataggccttagggacagcgtcaatctgtcctatatgctgacaggcggtaacgcggaggtcccgtttacgtatacgcttatcaataagggcggggaaaatattatttccttgaacggcgaaggggaagcgaagaaggactcagccgcggttgcggaaaacgacggatcgtaccgtgttacgctgcagggcggggaaaacacgatggagctgagcgccacggttccctatgtgcagggcgtcgcgacgtactgcgttgtggcgggcgccatgttcctggtcgccgtgctgctgattttattctttatccgtaaaacgaggcgcgtcaaaatgaaggaagagcaggagcagcagcgtaagctccatgaggaagcgctcaaaaaagagatggaaaaggagccggaaaagctgccggaagagcataccggcttcccggacggattctaattcctcatttcagatatttctaaggatttgatacccatgtataaagcagttgtttttgatttggacggtacgctcgtcaattccctttacgaccttgcgagcagcatgaacaaggcgcttgccgcctgcgggctgcctgtttacccggcggacgcctaccggcagtttgtcggaaacggcaggacggtgctcgtggaacgcgccgtagggggagaaaggcttacgccggagataaaagcgcgtgtgataaatttattcgacaaggactatgccgcccattgtatggacaaaacgaggccctatgagggcatacgcgaaatgctcgatgcattaaacgcagcgggtgtgaaaaccgcggtgctatccaataagccggatgagtttgtaaagaaaataatcggaaagctgtttcctggctttccttttacgcttgcctggggcaaaaagccgcagtttaaggaaaagccggattccggcgcgctgtttgcgatgcttgatgaaatgggcgtttcaagcggggaatgcctctatgtgggcgacagcaatgtggacgtatataccgcagagaacgcgggccttcccttctgcggtgtggaatggggctttcgcggaaagcgggagcttatcggcgcgggcgccgcggcgacggtaaaaaccgcgcgggagctgcttctttttatcaaagaaggggatgaaggatgaaccccaggaattatcaaaaagagctggatacactgctttcacagctcataaaagaaaacaagacgccgtcacttttcctgcatagctgctgcgcgccgtgcagcagctatgtgatagaatatttgtccgattatttcagcataacggttttttattataacccgaatatttacccagacgaggagtacctccaccgcagcgcggagcaaaagcgttttatttcagagctgcccgtaaagcatcccgtttcctttgtggaaggggactttgacaagcggcggttttatgatgcggtcaaaggcatggaggcccttccggagggcggcgaacgctgtgaaaggtgctatgcgctgcgccttttggaaaccgcaaagcaggccatggcgcgcgggttcgattattttgcgacgaccctcacgataagcccgctgaagaacgcgcggacaatcaatacgataggggagcaaattggggagcagcacggtatttcttacctttgctccgattttaaaaagaaaaacgggttcaaacgctccacggagctttcagcacagtatggcatgtaccggcagaattactgcggctgtgtgttttcacagggaagggaaggatgagtatgctgccacagggctgcctttccgaggacggctatattatcaaccaggggatgctgcgggaaatcccgttcggcaattacccgtcaagcaaaaatgggtgcggctggattgccgtatataacctgatgaaagcgctcggcaacgaaaaaccatatgaagaaataatggaggcccttacgccatatacattgtttaaggggcttctcgggacaagaatgccgggaatcaaaaaatatatccgcagccagggctacgcgatggacacgagctttttcaaaagcagcttcgagccgctcgccttaggctcgcaggcgggtatcatatattatgggacaggaaagacatatcattttacggcgtatcagcctacggaagaaaaaaccttccggttctttaactcggtatacggcaggcaaaacgatatcctgaccatggaacagtttattaaaagaatcaaaacgccccttactcacatcgtcgcggtgcgcgcgtaagggggccatagggaggttcctttcgttcgttccgcgtaaaaaacgcgggagggcgaaatggaaccttttcttctttatttcttttttgtattggggctgctgctgattatcaagggcggcgatttttttgtggacgccgccgtctggctggctgaaattacgcatgtgccgcagtttgtcatcggcgcgacggtcgtaagcattgcaacgaccttgccggagctttttgtatcgtcgattgcggccctgcaggggaaaaccgatatggcggcgggcaacgccgtcggctcggtcattgcgaacaccggcctgattttttcgctcgggattttgtttatcccggcgtttatcaggcggcgcaggcttttgccgaagggtatgctttttttgtcagcgattacgctgctgtggctttttaccctgtccggcaagattacgctgttcgggtgtgccggcatgtttttgctgtttgctgtttttatagcggagaatatccgggaagcaaaagcggaaatgcggtgtgctgcgcccccgcgcggcggagctgttccggcgggcaggcgcgcctgtgccgttcatattatgaagtttgttttgggcgccgccggcattttgctcggctcgcagcttctggtggacaacggcagcctgattgccgagagctttggcgtctctgagcggattatcagcctgaccgccgttgcgattggaacctccctgccggagcttgtcacaacggttaccgcggtcgccaagaagcaggcttcgctttccgttggcaatatcatcggcgcgaatatcatcgacgtagcgcttatcctgcccgtgtgcgccttcctgtcgggcggcgcgctcccggttggggcgcagaccttccgggtcgatttgcccgtctgcctgcttatcgcgtccgtcatggttgtgccggcgctgttcaaggggcgttttatgcgttggcagggtgttttaatgctcttttgctacggcgcttatttgctggctgtttgtaatttgtagaaaaagggaaagcaatatttgctttccctttttaaatctgatttatattttttctaatccttcagtattaagcttttgataaaaattttaatatttaatcagtggggagggaatagttgcggctgttccctcttcttttttgaagcaacctgcttcttgggttttttcataaaactttatatgtttaatcaaaagggaaaaacaattcgctgtttttcccttttgcaaacccttttcatcgacaagggaaaacctcgtcgcaggttttcccttgaccctttccagccgagcaaggggctgcacccctttacaaaccccacacgatagaaaccatgcagttcctcgttttatatgtagggtgtagtaatgatagtacgggaccgctgtgcgccgcgccttcgcgcggagtacttcgcgggtgcggtactttgtatactttttaccgtgtacgttttcctacacgatttaattcaattaaggtgcaggccgttttcttctaaggggattttcaaggggcttcgctcccccatcggctgtggagggataggcggagggcggcgcagctttagccgcccgtaagccgtaagggaacccatcgaatgtatatcccaataagataggtaacagaaaacccatagacataggtaacaaaaaaaggtaaactcaaggcataaaaacttgggaaagggagcgaaaaaaatgccttgggaggaacgaaaattgaaagctttataaaaataaaaacatatctaaaatgaggggggaaccatttggttcccccctcattttaataatcgattttatcaagaatccccgaaagataggcaagcaccacgccgtagtttgtcatgggaacccgctgttcctttgcctgtgctacgcgcgacagcacataccggcggttgaacatgcacgcgccgcagtggataaccaaatcgtacccgctcaaatcccgcgggaagtccgcgccgtttacatggtcgatggtgagcttttccccataccgctttcgcaaaagctttgggattttctcacgccctatgtcctccttcaagggtacatgcgtacaggcctcggcaataagcaccctgccgttttcgccgagcagctcgagcgcctgcgtgcttttgacaaaatagtcgatatcgcccttatactgcgcaaacagcgtggaaaaggaggtcagcctgctctgcggaggctttcgctcatatacggctttgaacacctgcgaatcggtgattatcagcttcggcgggcgggaaagggaatcgagcgcctgtgtgagcttgtcggtcgtaacgctcatgacaatgcattttttgtcgagcagctcgcgcagcgtctgtacctgcggcaggataagcctgcccttgggcgcctggatatcctgcggcatcacgagcagcaccaaatcgttttccccgacaaggctcccggtgatagtgatttcggtaagctcatccggaacagattcaaccagtgcctggcgcagcttatcgataccctgccccgtcacggcgcttacgacgaccggctccctttggcaggctgaggcgacagacgctgaaagcgcgtcgatattggccaatatgtccgccttgttgatgacggggatgacgggcgtgttttgctttttcagaagggcaagccacttgttttcctcgtcgtccggctcctgcgaaaaaagcataacggcgacgtccgttttctccattgcctttaccgtctgctccacacgctgttttccaagcgcgccggtatcgtcaaagccggcggtatcgataaatacgcacgggccgattccatggatttccatcgatttatacacggggtcggtcgtcgttcccgcaacgtccgatacaagggaaatcttttggttcgtcagcgcgtttacaagcgaggatttccccgcgtttcgtttgccgaacaggccgatgtgcagccggcctgcgcgtggtgtgtcctgaaggctcatatcacattctcctctgcgtttgatttccctgtcccaaattactttcctgtttttaaaaacggaaatcgcgttttccttccttgagctccagaaggtactcctccgcgattttctttaccttttcattcggtatctttttaagctcctgtgaaatgacgcgctcacccttttgcctggtgtcttcacttgcgtaatcctccaggtattccttgagcgtcatcaaagcgttgggctggcagcagtttgcaatctgtcccgacttgaccagccgcataaagcggtcgcccgtgcggccctcgcggtagcaggcggtacagaagctcgggatatacccaagccccaacagccagtttaccacctcgtcgagcgtgcgcctgtcgcttacgtcgaactgggcggagttttcctcctccggctccggctcgcagtagccgcccacactcgtgcgcgacgcgccgcttatctgcgaaatgcccaaatcaagcacgcgctcccttgttttctgcgactccctggtcgagataatcatgcctgtgtacggcacgcagatgcggataaccgcgacaatcttttcaaaaatttcgtcggaaatcgcgttggaaaactcgccggggtcaatatcatccgccgggcagatgcgcggcacgctgatggtatgcgggccaacgccgaacaccgcctccagatgctcggcgtgcatcagcaggccgacaaaatcgtatcggtaaaggttcaggccgaacagcacgccgcagcccacgtcgtcgataccgccctccatcgcgcggtccatcgcctcggtatggtaagcgtagttgtgcttcgggcctgtcggatggagcgcctcatagttttccttgtggtaggtttcctggaacaaaatataggtgccgatacccgcgtccttgagcttcctgtagttttcgacggtcgttgccgcaatgtttacattcacgcgccggatcgcgccgtttttatgcttgatggaatagatggtttcgatgctttccagaacataatcgagcgggttgttcacggggtcctcgcccgtttcgagcgccaggcgcttatgtcccatgtcctggagcgctatgacctcctgcctgatttcctcctgtgtcagctttttgcggcaaatatgcttgttctggtgatggtaagggcaataggtgcagccgtttacgcagtaattggaaagataaagcggcgcaaacataacgatgcgctttccgtaaaaccgttccttaatttcctttgcaagcttaaaaatcttttcgttttcctccggtaaatcgcactctaaaaggactgccgcttcccggtgggaaagccccttgcattccttcgctttttcaatcaggctgtcaataagctccctgttatgcctgttctgctgcgcgtattcgagcgtatcgaggatttcctgatggtctatgaactcctcagcctttttagattttggattatacatgctgtcatttcctttctgtccgctggatttatgtaatattaacgcttgattatacgatttgtatattgtgttccctccggttgataatctccccggccggccacaacctcatagccgattgacgacatcttctttttcagcagcgcaagcccctccgccgcctcctctccggtgctgattttattgttgtagagcgcgtattgcttacggctgcgtaagggggagaggtttggcattacgacgttcgcgcctgccagtactcccttttcgcgcccgttcttgtctgccgttgccagcgccgtagttgctggaatcagggcgtttgggagcatcaggcgtattatcccgattaaaaaaaggcaaagctgcgtgctgcccggcggttcgttgcggaaaggcgtgtcgcagtgcggcaggaacgggccgattccaaccatctgcggatggagcttttcaagatacagcaggtcttcggcaagaaattccgtcttttgatacggcgagcccaccataaagcccgtacccgtctggaacccgatttcttttaggtcgcggaggcaccgcatccggttttttagctttaaattttccggatggagccttccgtaatggccgctgtccgccgtttcgtgccgcagcaaaaacctgtccgcgcccgcgtcaaagaacgcctggtagctttgccggctgcgctccccgatggaaagcgtaacggcacattcgggaaaccgcgctttgatttcacggatgatggagcagaaacgttcatctgtaaaatacgggtcctcgccgccctgcagaacaaaggtacgaaagccgaggccgtacccctgcccgcagcagaaaaggatttcctcctgctccagccggtagcgctccaggcttttatttgccgcgcggattccgcagtaatagcagttgtttttacagtagttagaaaactctatcagccctcttatgtaaattcgattgccgaaatgctcccttgcggttttagaggaaagggaaaaaaggtatccggataaaccgctgtcgtccgcatgatgcagcagctccgtaaactcttccttggaaagcgttcgttcccggcaaagcttatcgataagccctctcatatcctgcctcccttattttttagagtaaaccgttttcgtcgtcatgccggagagcataccgagctttcccgaaagcgcgctgataacgtccgccggtgcgtctaccacgacgctgatgacgttgatattcttctgccggtatgggatgcccatcctgccgacgatataatcgccgaagtcggaaagcagctggttcatctggccgacgctctcctgactctccaccaatatgccgattagggcgattctcgtttccataatttcatcctttctgctgaaaaggcggttcgggttcctttcataaaaaatcccgcgtcctcataaaaaggcgcgggatgggagaagggcgcaaataccctccgaatattataaattcccatgcctttttacgcgggacgaacccttgtagtcagtacattactttcattatataccctgcccgtcttttttacaatccttcttttccttttttatacggtttatataagccgtcagataattgaagctgtacgaattcctaatttttttccttcgacaaaatgggagaataaggccgattcatttgtcatatgataggcatggagagaaggtatattctgtaaaagactgaaaaagaggtgctgtgtatgaaaagaaaaatatttttggttttacttcccgtctgtatcattttaacgctcttatgttcctgcacaagaacagccgtccagagcgaggcggatgagctcaaagcgaacgcctggcacgggaaaggggactatcagtccacaatcgatttaagcttcaacggcgataccgcggcgttcaacataaaagcgggcggcggcgccaagatgcagattgcaggtgaatgcgtcgttaacgacgacagcatcaccgttacggacagcaatctgaacgaacgctatgaattcaaatacaatctttctggcgaccagattgagcttacctatggaggcaatacggtaacgctcgaaaaagtaaaatgaccggcttttgccggtcatttttcgtttacaatgctccagtcgcgcatctcgtccacaccatactgtgagggcttggcattatggtcctctatatccatttcataatgctcggcgccggacagcgtaatgttgcgcgggccaaccttcaggcgctggtcaatcagctcgtcggtcacgaggggaatatggcgttcgtcaacataactttttttatcttccatttatcaccgctcctttaaaataatactattattctatgcgttgttccaatgaaaaaccgcggaaaattgaggaacaggttttcaaatgaaatagtgaaatttattctcatttagaatgaattcttgctgtatttgcagaaaaatggtaaaatacagaaaaaatagattgttttacaacaataaaaaatgaggatgtgcgatgggatgggaaaaaagaggtttgcggcatttactgcggtatattttttcttcgggaatttttattggattgtctggcagttctttcagagcgaaaatttgtttaccgatacggccagctccgctgtaattgggcttgtcatgttagcggcggctgggaattatttttatatggttaataaggaaaaaacagaaaagctatccatattttattttttgtttcccttagcgttcgcgctcgctgagtttcccctgctttttttgggctgccgttttgttggtttcttttccgcaaaaggaagctcgttttctatttttctcatgataacaattacgttgtggtatatggcgttttgttccctgtgcaagttaattaggcagaaacaactggcgctgccgaagggcgttacgctgtccacgccgtctatggttcgtatcgactataaacaaatcgctgacccgcataatatacgggacgcgaatccgcaaaagcggtccagtatgctggcaaacgttatttttgtctgggcgtcggtttgtgccggattattcctgttaacagcaattgtaaatttaatttacccatttattgatatgagtaaaattttcgtcaggtttggataaatatgtaagcagttgaatgccaggacgcttttttccaattggataatagaaatgataggtaccatgaccgattcttaaaaaatggagcgtattgaaaaaaatgaaatttttgattatatgcagatgaaacgtatatttataaaatttgtaattttgtttacttttttgctgacgcttgctgcgtgcctcgggtcggttgtcctgattgataaaaacgcagggcaatttgtcggtaacggtttttttatgggcttttccccgtggacgtgggggctggtgattgccggtgcgcttaccctctgcgcagcgtttttactgtggctccatttttctaaaaggctgagtccgaaagggcttacaattttttctgcggtgctttttgccgtctgcgccctgctgtacgttgttacggtctgcaatttccagtcaatccctacgacggacagctacatcgtacaggaccaggcgcttgttctggcaaaaatccctaacagtgtgattgatacttcgatttcttactttgcccgctacgcaaacaataatttgctcattcttttgctgagcggatttttcaaagcagtatctgcgcttggcttcagcaattattaccttgcatctattatattaaacgctttttgcctgtttctttcggagattcttatttatctggcggttaaaaagctttttggaatccgttttgcatgcaacgcgctgtttgtcagtgtgttgagccccattatgtacctgacagctccctgggtctattccgtttctctttgtatgccgtttgtcgccgctttgctgtatttgggtgcaagcttgctaaaagaaacgcgctatccgttccttgcggcggaggcggtattatttgcggcgactgcggtgctggggtacttcatccgtcccattgtcgcagtctttgcaatcgcgtttttcatttgctttcttatctggttttcaaggtcccataaaaaattaatgaagtcgctgttgattacagcttgctgtgtctgcgtgtccgttccggcctttttctgcgtaaacggcgtaatcggccgctattatcaggatggttccggaaattttccaatcacgcactggataatgatgggactccatacgaacggctcggtcaatgcggaagaccagcgttttacagcccagtttgagacaaaggaagaaaagacaaaggcaaatatagaagaaatcaaaaagacactgcgtgaatacggcatgccgggcctggccgtccatcttgcccaaaaacactgcctgacctggtcggagggcagcgcggattatacggtgcgtatcaagcagaacgcggcatatacgccgctttatgattacgtcgcgggggacaggaacgattttcttctgctctattgccaggtgttccggctcgctctgcttttgctggtgcttgtaagccttgcggggcagtttttcagtaaacggcgttcgccgctgtttttgtttgtactatcgctgttcggggggatgcttttttatttaatatgggaggcaaagcagtcctactgtattccatttttgtttctgcttacagtgctgtccgtgcacgggcttgaaacaattgacgggtatatttcgggtaagtggaggcgtaagaaaacagcttggaaaaagattgctttttgttcggtttccgcagccgttttgctcacgacgctttcctttggtattgcgcgatacggcgattttacgcaggaaatgggagaataccgggatgtaagcatcctttgcagcaatacctcaaatttaaaacagataaaaaacttagcgaaacagaacagtacgctgacgcagacgttttttacggacaaggccttcaatacggtcgaattgcaggcggcaaagcttggcggggatgcaagttaccttattacactttcaaccggtgaatcgggggtcctgctgcaaagcgccgtttcgggcgctgacgtggggaaggacgggcttttaaagctatccgtaccggatatccggcaaaaatcaggcggaaaatatacgctggaaataaaaaaagcggaaggaaaaacagattccatcggctggaggtactgcttttccagagagtcggatatgtaccacgggtcattatcagtcgacgcagaagtaaagccatttgatttaatggggaatatttacagcgtgtacaacgcggtttatatgccgcccattatttatattggcgtctttctgtgcattttgatgtttgaaatcctgataatttggctgttgaaaaaagtatatttgtaatgtctgttcaaggtggattgggcctgcagggtattgacgaataaggtatacatgctcattcccaaactttttcgggcagacaggcaaacgtaaagccagaaataattctgaaagattaagccgcatcagcggccaataggttgctgatgcggctttactatttatataaaaaaacggggcaggaattttcctgccccgttttggtggacgttaacggacttgaaccgctgacccttcgcacgtcaagcgaatgctctagccagctgagctaaacgtccaaatttgctgctgttctattatagccaaacgatttaaaaaaagcaagtcctttttttgatttatacggataaatctataaaaccgcccataaaatggaacgaagatacctattcttttataacaagtgcaaaaaacatggcccatttgccggcttacattcctgttttttaatgaagtgtaaattaggattctttttcttgcccgtaaagtgcctatatgctataatacaaggatagaatgacaaaattgtgctttgacaggggaggaacggatttctgtgattgttttggggattgacccaggttacgctattgtaggatggggcgccattacgtttcagaacaacgcgttcgcacctcttggcttcggcgcggttacaacgccggcaacagagcctttcaacagacggttagaggttatttatgacgagctttgcgccataattgaaaagtataaaccgcaggcgcttgcaatcgagcagctttatttccagaacaaccagaaaacggccatcaacgtggcgcaggccaggggggttatcctattggcggcgcagaaaaacggcctggatgtgtttgaatacacgccgcttcaggtgaaaacagcggtaaccggctacgggcaggcgaaaaagccgcaggtaatggagatgacgcgcaggctgctgcgcctcgaaaaggttccaaaaccggacgatacggccgacgcgctcgctattgcaatctgccatacgcaggcctccggcagccgtctgcgtgaaatgatgtacaaaaggggtttgaaataaatgctctacagcctgagagggacgctcatacacatggaggccggttttgccgtaatagaatgcggcggtgtcggctataaatgcctgactacgcttaatacccagcgcagccttccaaagctgcacgcggaggctaccctatatacgcagctcaatgtacgggaagacgcggtcgagctgttcggctttgcatcacagggggagctttcctgctttaagatgctgaccgcaatcagcggggtcgggccaaaggccgggcttgcgatattgtcggagctctctccggagcaggtggcaatgtgcgttgcgtcgaacgacagcaaaacgctgacgcgcgcgcagggcgtcggaccaaagcttgcccagcgtatcgtgctggagctcaaggataagctcaagggctttgcaccgggcggcgaggcgttcctgccgggcgaagcggcgcaggcaattgaagagggcaatatcggtaaggccgtcgccgcgcttgcggtactcggctacagcagcgctgacgttacgcccgtgctctcgaggcttgacggcaatctgactgtggaacagctcatctcggcggctctgcgcgagatgggaagacgctgaaaggaaaaacggaatggatacggaactcgattttgaaaacagaatcctgagcgcggcggaaattcccgccgacgcgggagcggacgacaatccgctgcgtccgcgcacaatggaagaatatatcggacaggaaaaagtcaaggaaaacctctccgtctttatcgaggcggcaaggcagcggcaggagtcgctcgaccacgtccttttatacggcccgccgggcctgggcaagacgacgcttgcgggtattatcgcaaacgagctgggcgttaacctgcgcatcacctccggccccgcgattgaaaagccgggcgatttggcggcgctgctcacgaacctcaatccgggcgacgtgctttttatcgacgagattcacaggctgtcccgcgcggtggaggaaatcctctacccttcaatggaggattacgcaatcgacattataacgggcaagggccagatggcggcttcttaccatctgccgctcccgcgttttacgctcgttggcgcaacgacccgcgcggggcagcttacagcgcccttgcgcgaccgcttcggcgtcgtgctgaggcttgagctgtactccccggaggagcttgctaccattgtaaagcgcagcgcctctatattaaatattcctatcgacgaggacggggcgctggagcttgcctcccgctcgcgcggtacgccgcgtatcgcaaaccgcctgcttaagcgcgtgcgcgattttgcgcaggtgatgagtgacggcgttattacctgcgagacggcgcagaccgcgctagaccggcttgaaatcgaccatctggggcttgacgcgaatgacaggcgcatgctgacggcgatgataaaattctataaaggcggcccggtggggcttgaaacgctcgccgccgcaatcggtgaggaagccgtcacaattgaggacgtctacgagccgtacctgatgcaaatcggctttttaaaccgcacgcccagagggcgctgcgtcacacaggacgcctgccgccatttggggcttaagcttcccgcatcgcaggcgccgcagaatacagggccaacgctttttgcggggcaggaataaagcttaattgattattataacagccctttgcagcgggtagggccttacggggctgtttgatagaaacatatattttggaggttttaagattgggtagactatttgggacggacggcgcgcggggtattgcaaatacggagcttacctgcgagctttccatgaacatcggcagggctgccgctatggtacttatcagcgatgaggtggagcatccgactgtgcttatcggcaaggatacgcgcttgagctcagacatgattgaaggcgcgctcgtcgcggggctttgctccgtcggcgcaaacgttttgctgctcggcgtcgtgccgacgccggcggtcgcttatcttgttaaaaagtacaatgccgacgcgggtattatgatttccgcgtcgcataatccatttgaattcaatggaatcaagatattcagcatggacggctataagctgcccgacgatttggaggaggaaatcgagtcgattgtgctcgaccataccatcccatacccggagctttccggcagccagctgggccatgtaaaatacgcggacagcgccgtggcggattatgtctcccatgtaatcgaatcggtgccggagcgcatcgacggcatgaaaatcgcgcttgactgctcgaacggctccgcttcacgcacggcaaaacagctgtttgagggcattggcgcgcagtgccacatgctttacgacgagccggacggcgtcaatatcaacgacgactgcggttcgacccatatggaaaacctgatgaagtatgtaaaagagcacgggctcgacgcgggcgtcgcgttcgacggagatgccgaccgctgcctggcggtcgatgaaaacggcaatattatcgacggcgactatgtcattgccatatgcgccgcggatttgaaatcgcgcggcctgcttaagaaggacaccgtcgtcggcacggtcatgacgaatatgggcttttcccgcttttgtgaggatatgggcatgaactttgtgtccacacaggtaggcgaccgctacgtgctcgaaacgatgatacgcgagggctacaacattggaggcgagcagtcggggcacgttatctttctcgaccattccaccacaggcgacgggcagctcaccgccgcgcagcttttgagccttgtccaccgcaggaacgcaaagctttcaagcatcgcgacgcttatggagcggttcccgcaggtgatgataaatgtaaaggtgagccccgagggcaagcgccgcttctatacggataaggacgtcaaggcggaaattgaccgtgtgaaggaaaccctcggaagccgcggcaggattttagtgcgcctgtccggtacggagccgctggtgcgcgttatggtcgagggagaggactctgctgagattacgcgccttgcgaaccagacggcggagcttatcagggaaaagctttcctgacggcacttgctttagatacagacagaaaaacatcggaggaagtttatgcgtacagcctgctggaaggattatgaactgctcgattgctcctgcggggagcgccttgagcgctgggggggcgttatcctgattcgccccgacccgcagattatctgggaaacggaaaaaaagcacccgctttggaaacaggcgcacgcgcgctacctgcgctcacagacgggcggaggcaaatggcaggtctataaaaaccatcccgatgtttgggaaatcggctgccattcgctccgtttccgaattaagccgatgggcttcaagcataccggcgtttttccggagcaggcggtcaactgggactttgtatcaggcaaaataaaacagagcgcaaggcagctgaacgtattgaacctatttgcctatacaggcggcgcgacgcttgcctgtctggaagcgggcgcgaaggtatgccatgtggacgcctcaaagggtatggtacagtgggcaaaggaaaacgcgcaggtgtccgggctttccgaacgccctgtccgatggcttgtggacgactgcatcaaatttgtgcagaaggagcagcgccgcggcaacaggtacgacgggattatcatggacccaccttcttacggcaggggcccgggcggcgaggtctggaagctcgaagaacagctttattcgctcgtagagctgtgcgctgccatattgtcggacgacgcgcagttctttattttgaactcatatacgacggggctttctcccgctgtaatggaatatttgcttggcgcggtattgacgccgcgattcggcgggaaggcctcgtcggatgaaatcggccttcccgttacgcagacggggctcgtgctgccgtgcggttccaccgcaatatggcagtcgggcggtaagtaagccggaataaaatgggattggaaacaatatggaagattttatcaggacagaaaacttggaattccaatatataaacgaagacgagcaaggcggacaggccatatctgttgatgtgttaaagggcgtatccatggaggtgaagcagggcgagttcgtcgcgctgcttggacataacggctcagggaaatcgacgatggcaaagcagttcaacgccatgctcctgcctatgggcggtaaggtatacgtcgacggcatggacacgctcgacgacgataaaaagtacgatatccgccgtaaggtcggcctggtgctgcagaacccggacaaccagcttgttgcgagtatcgtcgaggaggacgtagccttcgggccggaaaaccttggaatcgaaccggcggaaatacgccgccgcgtcgacagcgcgcttaaagcggtcgatatgtacgagtaccgcacgcacgcgccgcataagctgtccggcgggcagaagcagcgcgtggcaatcgcgggcatcatcgcgatggagccgcggtgtatcgtgctcgacgagccgactgccatgcttgacccgcgcggccgcgaagaggtgctcacaactatccggaagcttaacagggaaaagggcatcaccatagtgctgattacgcattatatggatgaggcggtgctttccgaccgcgttgtcgttatggacaacggcgaaattctgacgcagggtaccccgcgcgaggttttttcacaggtggagctgctcaagcgccataagctcgatgtgccgcaggcgacggagcttgtgcaccggctgaagtcgggcggctgtaatatagagggtacggcgctcgacgaagaggaatgcacacagcttcttttaaagctcctcaaagaaaactgcccgcagaagcaagggcgctgaattaaaggaatgagaacccatatgtatgtattggaaacagaaaatttaacatatacgtacggcgcgaacacgccgtttgaaaagacggcggtcaaagacgtgtcgcttcgcgtacaaaagggcgagtttatcgggattatcgggcataccggttccggaaaatccacgcttgtgcagatgttcaacggcttaatccgcccaaccgccggcaaggtcatgctgaacggcagggatatttgggaagagccgaagaaaatccgctctgtgcgctttgaagcggggcttgtgttccagtaccccgaataccagctgtttgaagaaacagttcagaaggatattgcgttcggccctaagaatatggggcttgacgagaacgaaatcaggaaacgcgtggtttcagccgcgcggtttacggggcttaaatcggagcttttatcaaaatccccatttgagctgtccggcggtgaaaagcgcagggcggcaatcgcgggcgttatcgccatggacccggacgtgctaatcttagacgaaccgaccgcggggctcgaccccaatgggcgcgacgtactgcttgcgcagattacggaatatcacaaacagcgcgggaacacgatattccttgtgtcccacagcatggaggatattgcgaaaacagcggacaggattcttgtgatgaacgcgggaagggccgtcatgttcgacgaaacaaaaaaggtcttttccaaaggggacgagcttgaaaagatggggcttagagttccccaggtcacaaaaatcatggcgcgcttgaaaaatgaaggataccctgtgccggacggggttctgacagtggaacaggctctttctgagctgcttgcgctgatcggcaaaaagggctgacagcgactaactggaaacgtggtgattctatttggtcagggatatcacgcttgggcaatacctgccgggcaaatcggttattcaccggcttgacccgcgcaccaaaattatattgcttctggcgtttatcgtatttattttcataacgggcaattactttgcgcttgccattacgaccctgtcggtcgtcgctatcatgataacgacgggaataccggtcaaaatgtatttaaaaagcatgaaggttatcctgttcattgtgctgtttacgggcgttttgaacctgttttacggcaggggcgagccgctgctgcagctcggctttttgaaggttacgctcgcgggcatcaacaacgccatatttgtggcggtgcgtattgcttcgcttatcatcataagctctgtcctgacgttcacgacctcgccgacggatttgactgacgcgctcgaaaggctgatgaagccgctgaaccacttgcacgtcaaggtgcatgaaatcgccatgatgatgacaattgccctgcgcttcgtcccaaccctgctcgaggagacggacaaaattatgagcgcgcagaaggcgcgcggcgcggacatggaaagcggcaacctcatccagcgtatcaaggcgcttataccggtgctgattcccctgttcgtttcggcgtttcggagggcttacgatttagcgacggcgatggaatgccgctgttaccagggcggtgacggcaggacgcgtatgaaaagcctgcatttctcaaggctcgacgcatttgcggcagtcgcaagcgttttaatcctgacaggagtggttctatgcaacgtgtttctcccggcggcggtccgctgaggaatatcctgctgacaatcgcatacgacggcagccgcttccacggctggcaaatccagcaaaacgcgccgagcgtacagcaggcctttcaggaagcgctttttcaagtaataggaaacgaattcgaaatcaaaggatgcagccgcacagacagcggcgtgcatgcaaatatgtattgtttgagcgtcaaaacggcgcaccggattccggcgccgcgcttaaaagcggcgctcaaccgctttctgccaaggagcattgcggtgctcggcgcaaacgaggcgccggccgattttcacgcgcggtactcctgtaaggggaaggaatatttgtataaaatatggaacagcgaaacaaggaacccgtttttggagggctatgccctgcattaccgttatccgctcgatgaagcgcttttacaaaaggctgcgcaggcgtatgttggaacgcacgattttacgtccttctgtacgctcgataagcgggaaaagggcaattttacacggacagtcaggcattttaccgttgtgcgcgacggcgatatggtgctcatgcgcgtagaagccgacggctttctttataatatggtaaggattatggtgggcacgctgctgtcagttgcgcaggggaaaataccagctgatgcgatagcgggcatattggaagcgaaaaacagggaagaggcgggaccgacggcgcccgcgtgcggactttacctaaaccgggtgtattatgaaaaggagtacgcaaatggctaacgaacacgataaaagaaaagaagcacaggaaaaagcccccggggaaccggcgcgggaaacgggcgcggtagaagaagaggaaagcagctacgaggaccgctcttttcgggaccttgagccggaaacggcacgccggccatccatttccaaaaagaccaaagcggttattacaatattgctcttatgcatggtggccgtcattgtagtcgcgggctggcagaacctgtctccggacaggcttgccggcagtgtggagaagaattttctcgataacggccagggcgatggatttccgtcctctctggtcgggacaaaggtcaataacggcaatattaagcggtgggataaaaacctggcctatgtaagcgatacctcgtttgtcgtgctcaacagcagcggcggcaagcttttggacaggcagataagctattccgacccggtaatcgtaacaaaggggaactactgcctcatctataatttaggcgggcttggctttgaaatcaatacgatgggcgataccatccataaaggggacgttaagagcaacctgctttccggcgatatcaatacgcgcggagaatacgctgttttgtccgaaacggatggttatcttggaaagctcacggcctttcatacggacaactcacagaaatacgcctattatttctcagatttttatccgagcagcgtatctatcaacgaagaaggcacaatggcggccgtgtcgggcgtttcctcaaaggacggggtgctgcgcagcgttttgtatgtgctcgatttcacatcagccgagccaaaggcaatgcttgagttcgacgacaaccttatttatacggtttcgtttatggacaatggcagcatcgcggtaatcggcgacagctcagccgcgattgttaaatcgaattacagcgataagcagacggtttcctatgacaagctgatgttaaccgcctatgatatcgatatgtataacgggattgcgctgtccctgtcgcgttccggcgacgggcgctcctgcaatcttttgtatctcgataaaaacgggaacgcgggggagcccattacgaccgacctcaagattacttccatcagcatatacggcgacaggataggcgtcttgagcggggaggagctgcgtaccttttacaagaatggaaacgaaggcgcgaagacgaacgccggcgtggatgcgaaggctatctgtatggaatcagaaaacagcgcatatatattggggattagcgagatacgctttacccgcttctgacgaattcacaaaatgctcattgtttttttatggattatatgatatattgtagcctaaggacgcgcaaacggcgggcttctgtttgccgcgcctggactttaaaggattggttttagcatatgagtcttgctctcgacatcatcatacttgccctgctcgcggcctttttgattggaggcatgaagcgcggcgcggtaaaaacactgattaacgtgcttggtaccatcgcggctgtgacggtatccatatggctcggccagcatgccgcgcggtggatatatacaaccttcttccagcaggatttgatacatagcatgtcccagcagattatggcgtcgggcggttccgacgtccagtccggcgtacacagcgcgctcggggctctgcctgattttgtgcttcggctcctgccgaattttggcatagacacagcgcaaatcggccctgcggtacaaaacacggcggacgcgacggcaaaagccgtcgaaacggtaattgcgcctgtgattgtctcgcttttaagtattgtggtgatgcttgtgctgtttgccttgatgatgcttttggtaaagcttgcgtcccacgcaatcggcgcggtgttcaacctgccggtgctgcacggcgtcaattcgtttttcggcgcggtgctcggcctcttggagggcgtactatttgtggtgctcgtcgtgtttttaatcaagctttttgttccaacgctcagcgacgcgcctcagtttttcaacagggaagtaatcgaaggtacctttatatttaagtatatatacagctttatcccgctatcgggcatttttgccggataagggagaggcaggaatcagaaagctatattgggaaggtaatcgaaatggaaaatggccgaaaagcatggaaggaaaacctgacggttccaaacattttatccgtgctgcgcatcttattgattataccgtttgtcttcttctttctatcgaaaaactatattgccgccgccgcaatggttatcatttcagggctgagcgatatgttcgacggtatgattgcgcggaagttcaaccagattacggcgcttggaaagattttagacccgattgccgacaagctcacgcttgtcgcggtaattatatgtatcggcatcatcgtcccgaaaattatccccctggtcgtcattctcgtagtaaaggatttactgatgctgcttgggggcgcatacctcatacaaaaaaagataacaccgcctgccgccaaatggtacggcaagctttccacaatattattttacctgtccgtatcggtcattgtgctgcttgaaatcattaccggcagcgcaagcgactttgcagtgctgacgaccgtgctcatgctggtcacgacggcggcaatgctgttttctatggtaaaatattttttgatatttttaagcctgctcagggaaaacaaacaggaaggtacggctaacagaaaagcgggcacaaaagattaattttgcggttatatccgcaactggaaaaggagaaacaatatgctttgctgcagatgtaaaaaacggcctgctgtggtttttgtcgccacaaacgcagaaagcgagtcgcagggctactgcctgtcatgcgccaaggagctcggaatcaagccggttacagacatcatagagaaaatgggaatatccgaggatgacctggacgctgtccaggagcagatggattccctaatgaaaatgagtgagaacggggatattcccaatttcgcggagatgcttgggcaggaccccgaagcggccgctggtgaggaagacgaccccgacaaggaagacggcttcagccctggcggcgcgccaacctttcctttgtttaagaatatttttaaccttgctgaaaagaaaaacgaccaggcaggcgccgacacggaaacgaagaaaagaaaacgggatgacaaaaagccgaagaggaagcacatcgacacatactgtaccgacctgacccagcgcgcgagagaaggaaaaatggaccgcgtaattggcagggacagtgagattgaacgcgtgattcaaatactgagccgccgctcaaagaacaacccgtgcctaattggagagccgggcgtcggcaaaaccgccattgcggaagggcttgcgctgcgtattgcgcagggcaacgtgccgcagcggctcaaggacaaggaaatccagctgcttgatttaacggcgctgattgccggtacgcagttccgcggccagtttgaaagccgtatcaaggggcttgtagacgaggtcaaggccgcgggcaacgtcatcctgtttatcgatgaggtgcataatctcgtcggcacaggtgattccgaggggacaatgaacgccgccaatatcttaaagcccgcgctttcccgcggggaaatccaggtgataggcgcgacgacgtttactgaatacaggaaatatatcgagaaggacgcggcgcttgaaaggcgtttccagccggtcaaggtcgcggagccctccattcaggatacgatagaggtgcttttaggcgtcaaatcctattatgaagcacaccatagggtcagggtacccgaacagattgttaggcgcgcggtcgttctgtccgagcgctacatcaccgaccgctttctgcccgataaggccatcgatttgcttgacgaggcctgcgcgtgcgcggcgcttcgcaataagagtatggagacatacgataagctcaaggaagaggagcgggcgcttgccacccaggaggacgaaattgcctccaacacggaaagcatcgattatgaaaagctcgccctggtacgggaggagcttgcgaaaacaaccaacaaaatcaagcgcatccagaataaggcgcttaattcctccgtggaggaaagcgaccttgcgcatgtaatagagctttggacgggaatccccgcgtccagggtacaggaaaacgagctgaagaagctgtctgacctggaagaaaagctcaaagagcgcattatagggcaggacgaagcggtagccgctgtcgccgccgcaatcaggcgcagcagggtgcagataagcccgcgccgccgcccggcctcctttatctttgttggtcctacgggcgtaggcaagacggagcttgttaaggtgctgtccacagagctgttcgatacgcccgagacgcttatccggcttgatatgtccgaatttatggaaaagcactcggtatcacgtattatcggctctcctccgggctatgtcggctatgacgaggccggccaggtgaccgaaaaggtacgccgccgcccatattcggtgctgctgttcgatgagattgaaaaggcgcatccagacgtgctcaacatattgctgcagattctcgacgagggcaaggtgacagacgcgcacggcaggctcgtcaattttgaaaacaccgtcatcatcatgacctcgaacgccggaagcaacaagaaggaagggctgatgggcttcggcaaatcagagcaggatatgcagaaggaaaaggttatcaaagccctgtctgaattcctgcggcctgaatttttgagccgtattgatgaaataatagtgttcaggagcctggacgacggtaatttccgtaatattgcgaagctgatgctcagcgaatatgtcggtacgctcgaggaaaagggaatcaggttttcctatgacgataaggccgccgattatctcgcaaagaaatctacaggcggcaaaagcggcgcgcgtgatttgaggaacaccatccgaaaggatgtggaggataagattacgaatgcaattatcgagcacagggaaggcgatattgcgggaatccatctctccgcagatgaaagcggcctgaaaatggatattttataaacagcgcaaatgtttattcaagagaaaacttttatgaactgcttgacaacgcggcgggttatatggtaaaatataacccgtcgcttaaaaggcagacaagccgtgcggatgtagtttagtggtagaacttcagccttccaagctgatcgtgtgggttcgattcccatcatccgctccattcgttatttaccggctgaccggttgaaatatcagatttgcgccaatagctcagctggatagagcaactgccttctaagcagtaggtcaggggttcgagtcccttttggcgcgccatatatggtgggtatagcttagtcggttaaagcgccagtttgtggcactggagaccgtcggttcgaatccgactatccaccccatacgacccattagctcagttggcagagcacttgacttttaatcaaggtgtccggagttcgaatctccgatgggtcaccattttgtttattccggcggaaacgccgtgataatatagaggaagcaatcaaggctttttgctatgatacctttcgtttggctgaaagccatggaataatgggctgtagccaagcggtaaggcaacggactttgactccgtcatcccgtgggttcgaatcccgccagcccagccaaaatttttgactggcgcgcggcgaatacccgcgtggcagtcagaaatccccttgggggagatacaaaatacataatatgggcccgtagcttagctgggaaagcgctgcgttcgcaacgcagagaccgagggttcgaatcccttcgggtccaccacaacgaatacccccgaaccttgtacatgcaggcacaaggttcgggggttatttcaatataccggtttaaaagaatgggtatggctttcgcagcgcgccatacctctttttttataattgggcctaattataatgtttttgttttgaatcgttgactgaagctattttaaatatcagtatagggatgggtgcggtaatttgccgcaccctgttgtttaaacatgaattttgtgataatattctacttaaagatatgattttaaatgcctaaaatgtaatacaggattatttaaggagtgctataaatgaaaaatagtgcggaaaaaggttttgaactgacttcgttgatattaacctgtgcggggcttttgtggtggcctgcctccgtagcagacaaagggttgaaggggcttcagcttgtactaaaacgaaaaaattatttcgcggagaatatcagcgagactgtttcagcccagttcgaaaaggcgtttaccaaagcggtgaaagaagcaaaaaagagattgctggaagatgagaacttatataaaaacagctacaaagagatattggacaacttgaaaatcggttatcagggtgcgcgggatttagaagcatgtattaaaaaaacggaggcatatttggagcagctcccatcacagcgggacgtcaaattaatcactgagacgctttttcactgctttgaagaagaaatggagtattatcccgagctcaaatgcaatttccggctggacaggcttgaaacggaaatgagcgccgtatgggaagaaatttctgaaatcaaagagaacatgcagaatacaacaaaagagccgcgcctagtattgcctggatgcccgccggctatggagctgataggccgcggcgggacgcttaacgattttaaatcggtaatagcgcaaaacagcaaagccgcggttgtaacgggaatcggcgggataggaaagacggagtttattaagcggtttttggcggacaatgcgtcggaatactcaaaaattggctggttcgattaccacgacagctttaaagaaacacttttatttaataaaaatgaacagggcgtagaaggaagagcagaggagctggtagcaaattcaaactttcccgttgatgatacggaaaaccgctggcacgagcttctcaggctgttaaatgaactcgataagaacgttgtgttagtatttgataatgtggacgacgtcaaacaggaggactttgagtcaattctgaagctgaaatgcagcgtaatatttacgacgcgcctccccatggcggaacgtaagcatacgttaaggatttatccgcttgattttttaacgcccgaggactgcgccaggctgttcgagcattattacgacaggaaagtggaggatgcggaaacccttcaaaaaattgttgtgcgtgcaggctgccatacgcttgcccttgagctgcttgcaaagacatgtaaaacatcgcgcaggacaatcggggaattttatgaggagctccagaaaagcggtttcaatttggagggaatcaaggaagaggtcatgcgggaaaacgggaaagaaagcaaacggtttatcgagcacatgacaaagctgttcagccttgcggcgatagaaaagggctctcttgaggagcatattttaaagaacctttgtacgataccgctggaccgtttcgatattgcgacattacgcgattggctggggctttcgtcctataatgagctggaaagcctgaacgataagggctggatacgaatttcagaggatggtgagaccgtaaccgtgcataatgtggttgcggaggttttggcaattgagctgcagccggtgctggcggactgcgaaaacctgcttgcatcgttatggaaaagtactgattatgaacaaacggatgtccatatatataccgccccgtatctccggcaggcggagggttttttagcctgtatgcgtgaagaaacggaggaaatcgccgctttaagcgcaaatttggcatttatatatgatgtccagggcgactatggaaaggcggaggaatactacagaaaagccctggagattgtgggaaaaatcctgggtcaggagcatcccgatacagcgacgatatacaacaacctggcattagtatatcaagcccagggctattataggaaagcggaggaatattacagaaaagccttgaaggttatggagaaaatcttgggccaggagcaccctgatacagcgacgatatacaacaacctggcgggagtatatcaagcccagggcgactatggaagggcagaggaatattacagaaaagccctaaagattacagagaaaatcctgggccaggagcaccctgatacagcaatgacgtatgacaacctagcgagagtatataaagctcaaggcgactatggaaaagcggaggaatacttcataaaagcgcttagaattagagaaaaagtcttgggccaggagcaccctgatacagcggcgacgtacaacaacctagcggtagtatatcgaactcagggcgactatcggaaagcagagaaattctatcaaaaagatttggagattacagagaaagtcctgggtcaggagcacccttcaacagcgacgacgtacaacaacctggcgggattgtatcaaaaccaaggcgactatggaaaggcagaagaattcttcataaaagccctaagaatcagagaaaaagttttgggtcaggaacacccttcaacagcgacgacgtacaacaacctggcggtagtatatcaagcccaaggttactataaaaaagcggaggaatactacaaaaaagccctgggaatcagagaaaaagttttgggtcgagagcatcccgatacagcgggaacgtacaacaacctggcgggagtatataaagcccagggcgactgtggaaaagcggaggaatactacaaaaaagccctgggaatcagagaaaaagttttgggtcgagagcatcccgatacagcgacgatgtacaacaacctggcggtagtatatcaagaccagggcgactatggaaaagcggaggaatactatagaaaagccctgaaaatcatagaaaaagtcctgggccaggagcaccctaatacagcgacgacgtacaacaacctggcgggagtatataaagcccagggcgactatcggaaagcagagaaattctatcaaaaagacttggagattacagagaaagtcctgggtcaggagcacccttcaatagcgacgacgtacaacaacctggcattagtatatcaagaccaaggcggctatggaagggcggaggaatattacagaaaggccttgaaggttatggagaaaatcctgggtcaggatcaccctgatacagcgacgacgtacaacaacctggcgggattatatcaagcccagggcgactataaaaaagcggagaaatactatataaaagccctgggaatcagagaaaaagtcttgggtcgggaacaccctgatactgcggcgatatacaacaatcttgcgggattatatcaagcccagggcggctatggaaaagcgttcggctattacttacggtcatataaagtattgataaaaaagcttggccatgcacatccaaacacgcagattgttcatgacaattttaaaacggcatacgaagaaagttcccggttcgatatggattttgaggcttggctggaagcgcagctgaaggaatgattgccgccgggctttcaggcggatgaaatattgctgggaaggaacagcaagcgccgtagaaatatacgcaaatttaaacccgcttacagccggctgcattcgcgcgtttgctccagcgggagctgtacgccgtccacggcacggaaaacagtgtaagcgtttaaaaatccgcatgaaaaagcggagccgccacctatggctccgcctcccctgaaaaagttcagtgagccctccgtttaaaaaacaagaaagaataaacgcaggggctgtatatattttttactccccctgcattcgcgcgcttgctccagcgggagctgtacgccatcccacggcacggaaaacagtgtaagcgtttaaaaatccgcatgagaaggcggagccgccacctatggctccgcctcccctgaagaaattcagtgagcccccgtttataaacaagaaaaacgaaggggctgtatatgttttttactcgccctgcattcgcgcgcttgctccagcgggagctgtacgccgtcccacggcacggaaaacagtgtaagcgtttaaaaatccgcatgagaaagcggagccaccacctatggctccgcctcccctgaaaaagtccagtgagctccccgtttaaaaaacaagaaaaaataaacgaggagctgtttatatattttactcgccctgcgcagggccgcgcctccggcctggctgccgcggccccggcgggtgagaaaatataacgatgctgtccggcggcgccctttcagggaaaccgccgccttcctatttgctgtctgagcgcccaatcaggtaatcgatggatgtgccgtagtaatcggcaagcttcaccaggttgcacagcgggatggcgagctttccggtttcatagctgccgtacgtcgtctggtggacgccgagggattttgccagctcgtactggctgatgcaccgggactccctcatttcccgcagcctgtttgggtaatcgcgttccaacatgaccgcctccgtgcgcttgttcgtgcccgcagccaggcttttgatgattttcctgactaatatgatatcatgttcctctacaccctccacgctgattgcgtttacgtcgtccagcccgagcaggtagtcggcggtcacgctgaaaaaccgcgccgcttttacgacggcctcggtcgtggggtaacggacgcccagctcgtagcttgaaatgacgacgttcgataccgataaagccttcgcaagctctttctgtgtcagcccatattctttgcgaagccgcctgagcctttttccgaacgttttatccatatcgaatctgtcctttttgttgaagttccttagccgcgggatacgcccggatggaggggcatatcccgctttatcaaaatacggccgggagcgggcaaatgaagcttgtgaaactgcgaaaaggttcaaatgtgcccggccgtatgatgattaaattgatattgtttctgccgattctacccatacgccctctaaaatcctgcctgaaatatcccttgcgagcgcaaacgatacggcgcggtaaatgccgggcggcgggctgttcagtgggatagaaagcgaatgcccgcccttgcccggctcgaacgtttggttgatggtttgcagatggctccagcgggaatcctcccgcttttccaggatgatgcaaagctgtaagcttgcgcagccggttttcatgctgtagcggcaggcggcggtgagaaggccgtccttgaagcaaatttcgcaggtacccacttcaaaatattccagccgccgccaccgcccccgcgtgctccctatgcacgtgtgggaggtggcgtcttcgtccggcgcgcgccagttggcggggctcataacaggccgggcaaacatgccggtgagaaggggggatgtggaacgctttttacctgtgccatgttatcagctccttgtgatgatagggaatgcgttagactgtgacggtttttgcgctgtaaattttgatagcctctaaaatgttaccattggaattcaatgcaacagccgttgcagcggcacggtatgtgccggagggcgggtttttatatgtagtagaaagtaaatttccacccttgcctggtgagtatgtccgtgttgttgaatgaacctgtgtccagttcgaaccggattttttttcaatcgcaataatgaatgtaacgtctattccattggcgaaactggtgtaatccccggttccaacgacattaccgttttttaaagaaacaccgacagataccgttccgaaataggaaaggcgcggttgtatttcctctgtgctaccatagcaaatgaagggttcttccgtggtttgtaaagtctgtgcggatacgttcaaaaatgtaaaggtgaacatcgcaagggcaagaaaaaacgcaaaagcttttttcgcctgtgccatgttatcagctccttgtagttataatgaatacgttatacctttatagtgcgggagctcacttgtacaatttctaagacgactcctttactattctttgcaaaaactgtcgtaacgttgcgataagtaccggaggatggcgacggatatgtacccgaaatactgttgccgcctctcccgggtgaaaaggttcgagaccattgctttactggtttccacgttgtaccggattgtttttgcaattcatttgttagggtaacgtcaataccgctggccatgctgacgtagtccccttggcagagaagtccgctatcttttttacttatatttgaagatacgctggcaaaataagtaagacggggtgaaatttcggtagtgttttcatagctttctaaaaaactatatgcggatgcgttcatcagtgaacaggtgagcattgcaaggacaacaaaaaacaataatgccttttttgccttagccatgttatcagctcctattttttgattgaaacgctctccgcaataggaatcaaatcaataggaacatttgaggttaataaaaattggtatttctcagtctgccagattagaataatttgcccatcctctttttttgaaagttttccttgatattcgccgatagtgacatcctcaacttctgcgttttcggtgtcaacaattgttaaattatcaatcgggcgttgtgtaaagtttaaaatattatagtccgaatccatatattcgacatttatcacatcgccatcgactttataagaggagaagctatagccctttggcaaaatagaaggagtatttgcagaaaaggagtcgctaatgttggtcttagcataagtattatcaaagctaagcaggaagttaatcgtataatcccgcaggctggaaacagacacaacgcccacgagcaatataatcagcaatacagatacgcagattgtcaccttgttcagcctgcggtagctgcgcacacgcccgcgcccgagccggtaggggtgcttcagccgcttttccatcccggcaagcttttccggcgtcagctggtactgcgggtcgttctttaatttttcgttcagctcattataatacctcccttcctcctcaatcgattcatgaaccttttcgcagaaagcagtttcatctattatattaccactttctggaatatcgttcaattttttatttttcataaataatcacctttccctcccaataatctttttgcgcggtcacgcgccctctgcagataggtgccgatgtacctcggctcgattcccagcagctccccgatttgcttgtaccggtagcacatgaaatacttgtacacgagcaggtgccggtcgagcggggacagctttgcgagcatcgagttcaccgcgtccctcacgtcgtcctgctcgataagctcctccggcataatcgccggaagccgccgttcctggttttcctcgcgcttcctcctgctgagctctttgcgcatgtacgtaatgcagaccgtttcgaccgtccgcgcgcagtaggaggcaagctcgtttttattgagccccagcagtacgggcaggtaatccatcagctttatcattgcgtcctgcaccatatcgtccgcggtgaacctgtcgcccactatcttatacgccatataattcattaaagagtagtattcctggaagatttttgataaaatagcattctcctctgtcgtaaaaagaaacatcatcataaaaaaatccctgcctgcatgttgtattttccttctcatctgcgtcttacttatgaaagcatgtcccaaaccctccaattttgaaacggcggcgcgtacaaacccgctggaaaaattgcctccccgcgcggggatagccgcggcgcgcgcgcaaacggaaaagcctccccgccgcttttgcagaggggaaagggtccgcgtaacgccctgcgtcacagaagggcggccgccgcctgccgcgaatatttgcggattcctattacatatgcgtttcttatttgattttttactaaatccctgcaaaaaacatttatttctctctttatgacaatcatatactatatttttacatttgtccagtatttcaagcaaatatttttaaataatcttgtgtgaatgtcatacacatggataaaattggaaagaaggtgatgcaaaatgctatgcgatttaggcgaaagactacaaattttacgcaaacaaaagaggatatcgcaggaacagctagccaaacgcgcggggctgtcgaggtcgagcatttccgcgtatgaaaagggaatgacgattccttccgccgaggtcatatacgaattgtgcgttatcctggacacgacgagcgattacctgctcgggctggataatatcaggaaaatatctgtggaagggctgtcccaaaggcagattgacatcatggtagaaatggcgggcgcgtttaagtcaaagaacggataacggctttctatgtgaaaataaatctcccctgtacgcgaaataaccgcgtacaggggagatttttgtatatccgcccaaaaagaaagccgccctgtcctgggcggcttataaatcgatgggcttcgttcttccgggaagcgtgccggataccggatacgcctgccgtaatttatgatgtaatgttcaaatgcctggaatccgccttaggggaatggccgtccgcgtatttttttgaaagctccgaaaaccgcgcgcggacatgcgcaaagcattccagcagcttgggggagaaagcgccgcattccccgtggagaatcatgtcgaacgcttcgtcgggcgcaatcgcttttttgtaaacacggtcggtggtgagcgcgtcgtaagcgtccgcgatgcctacggcctgcgcgcagatgggaataccgtcgcccttcaggccgtcggggtagccgctgccgtcccagcgctcatggtggtggcggcaaatcaaaaacgcgtaccgcaggtattccttgtcgtccatgcggtcaaggccggataaaatctcacagccctgctccgtatgcgtcttcataaggtcgaactcctcttttgtaagccgcccgggcttgttgaggattgcgtccggaatcgatattttcccaatatcgtgcagcgcggcggcgctcgcgatgatggtaatcacccgctcgttcaattcgtactcggggtaatgcttcatgacatcctcaagaagcaccttcgtaaacatacggatgcgcaaaacatgctgcccggtttcgacgctgcggtgctcgattacagaggaaagcgcgtccatcaggatttcgcgcgattcacgcagcttgcgcgcctgctcctcaaccatttcctccagatgcagcctgtggcggttgagctccgccgcgttctgcacgcgccgctttaccacatgcggctcgaacggcttcataataatgtccgaagcgcccaaatcgaacgcgcgcacctcgttctccgatgaatcctcagaggttatcacaatgacgggaacctttgaaaggcgcctgcttttcgccatttccgccatcacctggtagccgtcctttacaggcatgaccaaatcgagaagcaccgccgcgagcgagccgtggtgctttcttaatagggcaagggcctgctcgccgttttccgcttcaataatatcgtactgctcctcgaacaaagaacgcagaaccgcgcggttgatttccatatcgtctacaatcagtaaagtgtcccgattcatcccgtttctcctttgcctgcgaaagccgcaggacggattttgtctatgccatacatattacattataccaactgcgtttcatgatagcaagacaagaaaagcttaatttcggtaataacgcgggggaagccgctgttttggtatgggaaatatatccacccaatcaaaaaacaggcaaagcgaaagcccctgccttcgtttcgcctgcttatcagctgttacatgccagcctcgggaaagcgcaagatgaacacgccgttcccgcttcccacggacgccagtgcctgcgcggcccgcccgcaggacagcctgccctttcgccggcttccctatgggccagcgtcacgtcttttttagaaacgccgttctggcggacgcggcacgcctcgatgcttttggcccgccctgcgcggcacgccttctgcggcggcttcctcaaaagcgcttcgggggcctgccgtccgaagcgtggaacgctgcgggtacagggggcgttcacccggctgcgccgcttcagcccggctgggcaataaaatcacccgcgttctccagctttcccataataaacgggatgacctcctcgcgccggatttgcagcacgcttgaaaattcgccgtacagcatatcctccgcgtccttcatgattttttcatcggcggcgtggaatttcttcccttcgcttagtttttcctcgcgcttgaaatagagcgtttttatcatcttgaccaaatcccggtggtcgccgctcttgacaaccgcggtaaacgcttccttgcgccgttggtcgtcctcaatccattcgactgtggtgtccggcataatgctgattaagcgattgacctcctccagggtgagcagcttgcgcatcctgattttatcgctgtccaccggacagtatatcgtcatattctcgttttcagcgggctttaaaatataatacgtcatttttttgcccgccagcttttccggccggatgtctacgattgtacatacgcctgagttcccgtacatgaccgtgtcgttgatagaaaacatataagtcacctttgctccttctcttcgttccatggcatactgccgccgtagtatttttttgcgattgcggcctgctttgtttcgtccaggctcttaaggcgcctgcgccaccgctcctcatcctgtgcgccgtcgcccgcaatgcggacgaacgggcaggcttttccaaggcattccggcacgtccagcctgccgcatttgcctttcatcgatagatacgagcaatcgggcaaagcgcagaattcaaaatgtgccttgacgtcgtccgtgcggattgccctgtgggccgcatgcatttgtctcactccttttatatatgggcagcgcgcagtcaaagccggcttacgcgcgctgtaccggggcctgttataaccgtttgcggttttgcccgcacgattccttcatacctatattttaacagataaatagccatgttttcaagtaaaaccttctgcgctttttcactgaaaaactatgaaagattaaattcccgccttcgcgcgtattgaaacgggcggaccagacgtgctgaaaaggggaatacagaaggaaatccggccataattataaagcgggggtggttttgttgcaaaacggccatattacagtaaagacacatacagaagaaaagaaattggcgtacaggggcgaggtggttcttacctatcggatttcgtttcccgaatttgtgacctgccggtatgacgcggcgctgatggcaatcaataaattttaccggtgccgggcgcgcgggttcagggagcatgtggagaacgatttatatcagcaggcggtcgggcagctccaagctgcgcaaaaggagaattatccgatgcccgcttttgaggcagtcagcgaatttaccgttacctgcaacgacggctgtatcctgagcctttacacggaccggtacgaatatacgggaggcgcgcacggcagtacgcttcgcagcgcgcagacgtggaacctcagcggcggggggagggtatccctcagggaatttttcccgccgccggttgattataaagactgcctgctcaacgcgataaagcaacaggctgaagaggagccggaaatctattttgaaaattatgaagagctggccgcggagaatttcaacgatgaaaatttttattgtacgccgcagggcctggcgttcttctaccagcaatatgagattgcgccttattccagcggaatccgcgtatttgtactgccattttccgaaacggtgcgttcgcctgagcagctttgcagataggggtttttgcctgaatcattttcagaaaatcaaaaaatgataaaaatacggaaaatcgattttgtcaaataagtagaataaaaagcaaataatctaagggctaccgtcaaaacgccggtagttcacatttttatttgtggtgattatacgaaatcggtattattttcaattcatgcgtttgcattatttacaaaaaataaaaacagaaccacaggaaaaaatatattattttatttatcgtcattaacattgacattataaaataaaaattatataatgttaatgaaatgaatcatcatccatatcaataattaaatgttggccaatttaagccaacaggttatatttacaggctatatttaaaaaatttatgattgtgtgctttatctacacaaatcaggaggaggttaattaaaatgaaagggttcctcgaaaaaaggtccggaaacaaatgggcggccgtcatagcggcaagcctgacaatcgtggtgttatccggctttctcctttcggggaggagcgccggggtggccggcggcttcttcggcccacaggtcatgcaggaaaaaatggaaagtacaaaacaggtgtctttgttcaataaaaacagcaaaagcctgacatataaggaaaccatgaatcaaagcgacctgccggtgagcgagcgggccgacaaatacggcacctacgacgtttttgtggacgaccaggatactcagtatgtgttcctggcggactcggatttgttttgcggctttttaaagacgggcgcttcccaggaaacaggcggcaggtttatttcagagctggacgcgcgcgggattgcggacgcgtaccttatggacatactcggggaggaccagcgggagtatgtatatgagggcatgtactgccagtcgaatatgtaccatattacgtacgcttcgtacatcggcgactttaaaacagacgacgagtgcattatttgggtgaggggcgaaagcggcgaaatctatgcctgctccatgttcaaccgcggcaggtacgacaggttccgcgacagcagcctgtcgtttaacgacagtacctccttgctgatggaaaagcatccggagcttgaaacggattttaacgactgtgaagttctcgataggtacgttaccttgtcagacggcgggaacctggtcgtcaattatgaagtgtataacagcctggatggaagtacacaggaatatcctgttcccgtatcctgaacggcggcataaacaattattacggcggccggagcgctttttgccctccggccgctttttctgttgttttatcaggcttcggcgcgcgaagggggagcggcgttcgtctggctgcggcgcgcaagctcctgcacgcaaaattcaaagcttgcgttatcgcgcgttacgtcgaacagcgtgattttcccgaccataaaatgaatacgtaccgtacacgcggggctttctttaatcacgcgcgccatttccccattctggggcgcctgcagcttttgcgcgccgctatcctgaatgagctgtacgcgcaggcggtacggcccctgttcaatcaaagcttccctctgggaatatttcagtattttagcgccgcggtaggtggcaaggcggtattcccgcccgccgtaatatacgcttgcgatgcagccggtaaagcttgtaccggcaaacgggatgtccgcgatagagagcatcgcgcagcagtctctgttttcaaaccagctgagctgtgcccagagatacgattttggaaaggagcagccccagtctttttcaatatagcccgtaccgccggtgaaatcaaaagcttccccgttaatctcaagcgtgcctgtaaggctgtgcgtcaggcttagaacaccgtgattgcactgcatcatcgggacatggcgaaacggccccatcatatccgtttcgggaggcgtgagcgcgccgtactggagcgtgccctttacgcttaatccctttccctgcaaatcgacgttgattccggcgcttgaaaaggcgtttgcgcctacgcgtacgtaaaaccggttctcctccgcgtgaaaggcggcaggcggaaaacggaagcagtgcgagccgttttccgtaacgacctgaatctgcgcgtagcgttttttgtctttacagacgtggaaggaagggataaacgcgatggttgtaccgttgccctggtgctttaaataccagccctcaaaaaagggatgggttttgtattttccgtgaaaattacgcatgtccgatatcctcctgtgccggattgtcaatcaggtttcctttgtaatcaaagcgagagccgtggcaggggcagtcccagctgagctcgtcggggttccattcgagctggcagccgagatgcgggcagcgcgtggggacgaggaaggtttcgccctgctcgtccttatagacgccgaccttttccccgttacaatcaacgaccccgccgtggcctgtgggcagcctgtctatttccgttttcggcacgtggaacagctcctttgaaaggcccttgaccgcctgcaaaccttccgcgagcaccgattttgcgccgggggaggtcgctgagcgctgcgggctgaacatttccgtataggggctttcgtctccggtaatcaggcctgtgataatctgtgcggcgagcatggagttcgtcatgccccatttattaaagccggtcgcaacataccagttcggcgtggtggaagagtaacgcccgatgtacggaacgccgtccgccggaatgcagtcctgtgccgaccagtgcgcggtttccgcgctgtccggccaaaattcctttgccttttgccggagcattttgtagctgccgccggcggagtgctcgcctgtgcggtgcccgccgcccccgagcagcagaaggtcgccggagtttcggaaggaaagcccgtcctcgtctatgccgaggaacatccccgaaagcggctgcgcgttttcaagcgcgagcacatagctgcgcttctggtgcatacgcgcgaaataatagcccggcatatttataaagggataatgcgtcgcgaagacgatatggtctgccttcacgaccataccgtccgccgtgacgacgctgttttcctctgcgcttaaaacgcgcgtctgctcatagaccgtgacctcacgcgcgattgcctccaaaaatttaagcgggtggaattgtgcctggcgctcaaaatacagcgcgcccgcagcctcaaacggcagcggcgtttcctctgtaaaccgcgcgctgatttgaagcgactgcgcggcgcgcgcctcatcctctaaaagctggggccggcggcacgtgtacaggcaggcgggcagctcctcaaagcagcagcttatttgattctcctcgacgatacggcggtattcgctgattgcctgctcgttgccgcgggcgtacagctttgctttttcctgcccgaaggtctttataagcttgtggtaaacggcgccgtgctgggacgtaatcttggctgtcgtattcttcgtctgcccgcttcctatgcgggaagcctccaaaacaatcgcctcaatgcccttttgtttcaggtggtaagcggtcaggattcccgcaagcccgccgccgattatcaccgtatttacccgtttgtcgccgtaaagcggtttgcgcggctctatgctagtttccctgctccagattgattccatcataagtcacctctatgataggattgactatgttggaaaaaataaacagctttcataagtttttgcaggattgtcaaacaggatggatttttcatgatgtatcgccttacggcgaaatgatggattgctttgcaaaatgatgtgccttcgcttcgctgcggcatgatgtaatgttagcccctatgtcccgcaggacacatcattgccgaaggcagcatcatcgcacgaagtgcggcatcattgcccgaatgggcaaacatcattcaaaagctcccgcagcgcgtcctcatcataaggaaaaattttcagctttgtattccggcggaaaaatatggtataatataccgcaaaaggaatttggaggcatattacatggatatcttgtttgtcaactgctgtatcagccagaaaaaagaggaatcccgcacactcgggctttgccgcgcttttatagaagcctatgaaaaagcgcacccgcaggaccgcgtcagcgagcttgcgctggaggacgaagcgctttcctggatgacggcgccgcgcctcaaccggcgcgacgggctgatagggaagggcgattatgacgacgagctgttttgctatgcccgccgttttgcgcaggcggataaaatcatcgtcggcgcgccttactgggacaaatcgttccccgcccttttaaaggtgtatattgaaaacgtgagcgtaaacggtattgcgttccactatacggagaatggccctgagggcctgtgccgcgcgcgcaagcttttgtacctgctcacctgcggcggggaaatcgggcaggcggattccggaatcgcataccttcaggatgtatgcgatatgttcggaatcaaagcgtttgattcgattgccgccgaggggctcgacatcgaaggcgcggacgttaaggcgctgatggagcaggcgtgcggcgaagcgcgggcgcttgctgagctgtggtgagaatggctttttaaatgcgtttattaagaaagcgggaggcaagcgcctcccgctttatgcatgtttgcttaaacccgtggaataccgacggcctccgccataccggtcaaaatttgttcgcgtgccccgcttgccagggcctttgggtcggtatggtagcttgcgttataaaggcaggagaataagaattcattaaacgcgatgttccagtgcttatctccgtaggtttcatcccgcgccaccaaaaaggtttcaaagctgttgagcgcaaagccgatggcgtagagcatttccatatcccactcgtatccgggcatgaaaacagggcaatccttatctgctgggataaaagggatttttgattgattcgtttcatatgtagcgtgcataaatgcctcctgatgtttgttatacgcgcttgcagaaaccccttacctgcggtataataaatttaccataggcgggcttcggcctgcgtgtggggtgtagggcgttgtgctgtctttgttcaagggcgcaacgtccgttttttattttggctgattacgttttatagcccgttgctatgggaatttcctcctttcttacgtacctatcatagctgaaaatcgtatgaagaggataaaagttgaaatgtattcacaatatacttaataaaaatacttattgtagctacaataagtgatgagaaaataacaaataaaaaatccctcccgcttcaattcaagaaacggaagggactgctattatccggttttacagctcgctcctgccttcgagcgcccttgcgagcgtcacctcgtcggcgtattccaaatcgccgccgaccgggatgccgtaggcaagccgcgtgacccttacgccgagcggcttcaggagctttgaaatatagatggcggtcgcctcgccctcgacggtggggttcgtcgccataataacctcctgcacgccgcccttctggatgcgcgcgagcagctccttgatatatagctgctcggggcctacgccgcccagaggtgaaatcgcgccgtgcagcacatggtaaacggcgttatactcctgcgtgcgctcgagcgcaatcacgtcgcgcgggtcctccaccacgcagatggtggtatggtcgcgcttttcgttgcggcatacggggcagaggtcgccgtcggtcaggttgcagcattccttgcagtaatggattttttcgtgcgcgtcgaggatagcgttcgcgaattcctcggcctgcgccttgggaagctttaaaatatggtaggcaaggcgctgcgccgttttcgcgccgatgccgggcagccgttcaaactgctcggttagccttgcgagcggggcaacgttatatcccgccataatcagaacagccccggaatgttaagcccgccggaaattttctccatcgtctgcgccttgtcgtcggaggccgcgcgcagcgcttcgtttgccgccgcgataatcaggtcggagagcatttccacgtcctctgggtctacgacctcgggctttaaatcgaccgccttgagctcgagcttgcctgttacggtcacgttaaccgcgccgccgcctgaagatgcgttgtattccttttcttcaagctgcgcggtggcttcgtccatctgctcctgcatcttctgcgcctgctttgccaggtgctgaatgttctgggtaccgcccgtattgtatccctgtggtaatcttgctttcatgaaaaacatcctttccttctactcttgctttattttaattatcataatcaccgtcggcttccccggttatctcggtaagcggcacgcccgcttcctttattttctccgcgaggctttggagcgggtcttccttttttgcttcctcctgcgttctcctgtatgggccgagcttataaacccgcccggtaacctccttgaccgcgacgcgcattttatcgcgctgcgccgactggcgcaggagcttgaacggaatatcgctttttgaatctatcaaaaggaattccccgctcacatatgcctgcgtcccttcaaatgaggcggcaatcgttttggagtattttttcaggatttgcaggacctcggcccaatcctcaaacggctccgcgtttttcaggatttcctcaaaattgggaggcgccgccgcctgctttggcggcgcgggtacggcctcttcctttttcggaggctgctctacgatgggcgcgggagggggggcctcgtttacaggctcgggcggcagctgcggcgcgggggagggagccgccggtttttgctttgccggattgtccgcagcgggcttatccgccttgggtatatcggctgctttttccggtgcttcctgcgccgcggcgggtacgccgtatttaactgtgcgctcaagccttgcaatacgcgcaagcagcgcgtccatgtccgggtcaagctgcggcgagcagattttaatcatcgccgtttccatctccgtgcggcggtcgttgccccggagcatcttttcataggagctttgcagcacatccatcgcgcgaatgatttccgcaagcgaaagcttctgcgcctgcgcgctcgcctgctcaaattcgtcgtccgccatcacaagcaggccgcgtgggtccttcatggtttttatgagcatcaaaccgcggaaatgggaggtaagctcctcgcttaaccgcgccatgtccttggcttctttgtataaggtatcgattgtgccgagcgcaagcgcgcagtcgcgcttaatcacggcgccggcaagtgaaaagaggtattcccgcccggcaagcccggcgacctgccgcacaagcgcggaggtaatgtgcttgtctgtgccaatgcagcggtccaaaagggaaagcgcgtcgcgcagcgcaccgtctgagagcgcggcaatcaacagcgccgcgtcgttttcaagttctgcgccctcctgctccgaaacataccggagcctgtccgccgtcgcctggggcggaatcctgtggaaatcgaagcgctggcagcgcgacaggattgtcgcaggaatcttgtgtacctcggtcgtcgccaaaataaagacgacgtgcgcgggcggctcctccagcgttttcagcagcgcgttgaacgcgccgatggagagcatatgcacctcgtctatgatataaacgcggtattttgcgcgcgtcggggtaaaggcggattcttcaatgaggctgcggatgttttccacgccgttgttgctcgcggcgtcgatttcgacgacgtccataatctcgccgttttcgagccctttgcagttttcgcattcgccgcatgggtcgccgttttgcgggttcaggcagttgacggccttcgcaaggatttttgcgcaggtcgttttgcccgttccgcgagagccggtgaaaagataggcgtggttaatcctgcccgccttcagctcgttttggagcgtaacggtcacctgcggctgccccgcaacgtcgctgaaaaaccgcggccgccatttcctgtacagtacctgatacatcttttcacacgcccttcgctttaaaattatcccacataaaaaagagcaagacagacggaaaacccgtttgtatatgagaacggcagactgactgcatcgcatcgggcataccgcttaatgctgctcggttccccgcctgacatggttcacgggtcccaatcgcacagggcctgccgcccacatatataaacgaatcattttctggcttgctcttcttgccgcctaatccggtgacgggaattattatactataacctgaatcaaaatgcaagagcatgaaagccttttatttccggtatatattcggaaataaaaggaacccggttgcttttcccgcttaaatcctgtatgataaaaagccggaaattaaattccgaatatggcaaaacccgtgttgaaaggctttgcagctgcgggtgaaagcccgcgccagccctctttcctgcacggctgattttaaaaaataagaaattctgaaaaaatatcttgcattttggaaaaacatctgataagataactagtgttgtaatttcaaaagcatggaataaggaggtgcagacacatggcaaaatgtgatatctgcggcaaggatgttgctttcggtatcagagtatcccactctcacagacgttccaacaggacatggaagccgaacgttcagcgcgtaagagcgatcgttgacggctcgccgaagcgtattcacgcttgcacccgctgcctgcgttccggtaaggtaaccagagcagtctgataaattgtttgacacttaggagccgaaaggctcctttttgttttttacgggcgtttattcgccgtttatcccttgtatttttaaacagcctgctgtataataaaagctaaatattttaatggaaagtagcgtcttttttacggaggatttattatgctgatagatttaataagcggccaacttagttttacttctgccctgatgggaattctagccagcctacttattattttcctagtactgccttttcacgaatgggcgcatgggtacgcggcctacaagctgggcgataaaacggccaaatacagcggcaggctcaaattcaacccgcttgcccatatcgacccgttcggcgcgctgtgcctggttctgtttggctttggctgggcgaagcccgtgccggttaactcgcgcaatttcaagcgcccgaaaacagatatggcgattgtcgcgctgtgcggcccgcttgcgaacatcattgccgcgattgccggaggccttattttaaacgcaatttttgtgttcgggaatgccatgctcataacgggcgggattctttattatatcgcgctgtttttaaactattatatcggcattaatatatttctcgcggtgtttaacctcatccctatcccgccgctcgacggttcaaaaatcctgttcgcgtttttgccggaccatatagtttataaaatttaccagtatgagcgctttttcttcctggcaatctacctgctgctgtttatcgggttcctgacaggcccgctcaacttcctgtcaagcgcgctgcaaagcttcgtaatgtggctgacgcgcctgccgttccttctttttgtttaaggacggagtgaattgaaaggaggaggggcgtacccatgcagcaggaaccctatgtgctacagtataagctgacctcgtttgaagggccgctcgacctgctgctctccctgatagcgaagaataagctcaatatatacgatatccagatttctgagctgctcgagcagtacctggagcagataaacgccatgcaggaaaacgacatggacatcgaaagcgaatttctggaaatggcctccaggctcgtttacatcaaatcagtcatgctcctgccaaagcacgaggaggccgaggagctgaaaaaagagctgacaggccaattgctcgaataccaggaatgcagaaaagtggcggcgcagctcgggcaaatcgtaacctatgatttatacgcttccgccccggcggagatagaatatgatatgacctacacgcgcgttcatgagagcgccgacattgcgcgggcatacctttcagcggcgggcaggggaaagaagcggctgccgcctcctgccgatgcgttttccggtatcgtatcgcgtaaaatcgtttcggtcaattcccgcattatttacgtgatgcgcaggctctataaaggggcggtcgtgcgctttaaggcgctttttccgaacgggagcgaaaaaacggagctcgtcgcgacgttccttgccgtgctggagcttgtcaagggcaagcgcgtacgcattgagggcgacggcgaaaacgccgatgtgaaaatgattcaataaaggtgtctggaaaggaatatcccaatggagaaacaggaaatcaaggcggcaattgaggcggtactgttcgcggccggcgcgccggttgaggcggacaggcttgcaaatgcgctcgaaacggaactgaaagccgtcaagacagcggcggaagagctgataactgaatataacgcctctgaaagagggcttaccattataaagctcaacgacagctaccagatgtgcaataaaaaggaatacggcgaatatatccgcagggtaatggatttgcggcgcaatacgccgctttcacaggcggcgctcgaggtgctggcggtcgtcgcctacaaccagccggtaacaaaggcgtttgtcgaacaggtcaggggcgtggactgctccggcgtaatcggcagcctgacggcaaaggggctggtagaagaacgcggccgcctggagctgcccggcaggccgctcctttacggtacaacagaaaacttcctgcggtgctttcaattaagctcgcttgacgaccttccgcccttgcctgaaaaggaaaaggcgcaggacgaaaacggagaaaccgaaatacaggcggaggaaaaagaaacgcagcccgcctgatatcatccagtaatacgtaaaacggacgggagggcaatgaaatgacggcgctgcttatcgtacttttggtgctgcttgtccttgctgttttgcttttccttcctgtaaccttgaaagcaagctatcaaacggagctttttgccgagctgcgttacctgttttttcgttaccagatagcgccgcgtaaggaagaagaagcgaaaaaaaagaaaaaaactgctccgaaaaaagaaaaagaagagctatcggaagaaaaaaactcgatttgggacattataaaggaagaagggctctccgggtttcttgatatcctggaagagctggcccgtgccgtaggcggtgcgcttaaggcgatttttcaccacgcgacgctttctgagctggccctccaaatagcagtgtgcggggaggacgcggcggactgcgcagtgaattacggctatgtatgtactgcggtatatccggcagtcgggattattacgtcttccatcaggcgttacaaaaagcttgacgttgacatcaggcccgactacgacgggaaagaaacccgcatccaatgcaggctccgcttgagggcgccggcattgtttgtagtctgctccgcggggaaagccgtttatacggcggtcaggcaaatcataaaagcaaaacggaagggaatactataaatatttattccggctgtttcattaagccgccgtccgcagggacggtacggattgaaatataaattacattaaaggtaaaggcggtgttttgtatgagcgatcatcccattgaagggcttatgaacgtaaccatgcagaaaatcaaggaaatggtggacgtcaatacgattatcggcgagccgatttctacttcggacggcacgacgattatccccatctccaaggtaagctacggctttgcgtccggcggttccgatatcccgtccaaaaacgcgccgaataaggaaatcttcggcggcggcagcggcgcaggcgtatcgattaacccgattgccttccttgccgtacacgacggaaaggtcgagcttttaaacattgagcattacgacggcacggccgaccgcgtcgtttcgctcgtgccggaattaatcgataagatttccggcctgttcaaaaaagacaaggacggcaaaaaagaggaaaaagaagcggaaatcaagctcgacgaccccgaggtctgaggcataatccataagggtacaggcatatttattgctgttaggcgttttgcgcccaatcaattctttttgggagagattgcccttgcgtaagaacagaagagctacagcagtactatgccttgccgctttctttttgacggctttttcatgcaggcctgcttttgcggaagaggccgcacccggcgtttccgcaagagcagccgcgctgttctgcgtaaacagcggtgagtttttatacgaaaaaaatgccagtgaaaggctgccgatggcaagcacgaccaaaatcatgacgtcgctgcttgcgctggagtcggctgctgccgcgaacaaaacggtaacggtcacaaaagagatgtacgccgagggctcgtccatgtacttaaaggcgggcgaccagataaagctttccgaccttgccgccggcatgatgatggtgtcgggcaacgacgcggcgaacgcggcggcgctcacggtcggcgggacatatgaaaaattcgcggacctgatgaatatgcgcgccaggcaaattgggatgaacaacacacatttcgtcacgccctcggggctcgacgacgaggagcattattcgaccgcgcacgacatggcgctgcttcttgactgtgcgaaccagaacgatacatttgccaaaatcagctcccaaaaaagcatgaaggtaagcttcatcaagccggaggaccagtcctatacgtacggaaaccacaaccggcttttatcgctctacgagtactgtacaggcggcaaaaccggctttacaaagacagccggcaggtgccttgtcacgagcgctgaaaaagacggcgttaagctcatagcggttacgctgcacgcgccggacgattggaacgaccacatgaacctttacaattatggtttttcccagcttacgcgcgtttcgttcgacgatacggcttaccatatcaagctgccgctgacaggcggcggcaaggaccaaatcagcgtcagcgcatatacgacggcgggcgtcgtcgtgaaaaacgaagacaaggataaaatcaagcgggaggtgtcccttccgccgtttgtttatgcgccggtggaggcggggcaggtgctcggcaaggtcatatatacgctcgatggcaagacggtcgcgatgaacgacctggtgtccgacggcgactacccgctcaaggaagaaaagaaaggcttttttgcgtcgattgcggactttttcgcaaacctgttcggcggttagggcttgtatataaagaaccaagaaaagataaggaaaaatggtgacacaatggcagagaaaaaactcgtccgtttacagaagatgcttgccgactgcggcgtcgcctccagacggaaatcggaacagcttatagaagagggcagcgtcaaggtaaacggcagggtcgcgcatatcggcgataaggtcgacccgatgaacgacaaggtgctcgtcaagggcaggaaggtatcgggacgcagcaaaaacaagcattattacatcatgctgcacaagccgcgcggctatgtgacgaccatgagcgacgaaatgggccggaaatgcgtggcggagcttgtaaaggacgtccccgcgcggatttatccggtggggcggctcgacagggaatccgagggcctgctgctgatgacgaacgacggggaatttgccaataaggtgacgcaccccgcaaaacacgtctataaggtataccgcgtaacggtccgccctgaaatcaccgaggaacaggtcacgcagatgtgctccggcatggtgatagacggcaggaaaaccgccccctgcgaggtgcacgtgataacgaaaaaagaagggcgctgtgtgcttgagattgtcctgcgcgaaggcaggaaccgccaaatcaggaaaatgtgcgagcagctgggccttaccgttccgcgcctgaagcgcacggctatcggccaggtcaagctcggcatgctcccgcagggcaaatggcgggagctgacacaggacgaggtaaagcgcctgaccgcagcgccgaatacgacaatagaccggtagtatatataggaaagggcggaatacagatgctatgcgtgaaaccgctggacgaccccggcgttgtacaggctgtcctgaaacaattccagctgtccgtacctgcgcggacgggcaggcttttagctgcccaagagcaggggaaaacgcttggttttgtctacgtggagcaaaaaccggacaggctgttcctgcatgtgtttgaattaacggactgcgccgattacggccggccgacaggggaagacatggaaattgcggaatatcttgtccgtgcggcgggaaactatgcgtacaacaggctgcttccggttctggaatgcgcgcgcattccagccctgccgctgcttcagcactttggttttaagcaatttgaccagaattatcggcttgcgctcgaagtattgttcaaaaagtgcgaaaattgcggcggaacgtgattttgcttgtagttcccgtccgatttatttataataaaatcgtatagttttctatttttggcaggatgaacggaggattacggatgaataaagcagacaaacagcagatgcttgcaaatgcaaaggctgaactttcacaaacagcggcttataaaacactggaggctttttttgacgagggccaattttctgaggtggacgcccttacggtatccgagaatgggtttacggagggaatcgccgcatacggaacggcaaacggctgccccgtattcgcgtttgctcagaacagcgacatcgccggaggcgcaatgtcgaaggcgcaggccgcaaagattaaaaagctttacgatatggcggaaaaaacagggacgcccatcgttgggttttatgattcggtcggtgcccgcctcaagcagggcgcagacatgctctcttctttcgggcgtattttaaacagcatcggtacgctgtcaggcgtcgttccgcagatttccgtagtgctcggcccctgccttggcaccgcggcgctttgcgctgcgagcgcggattttgtaatcctcaccgaaaaagcggagctttccctcaatacagacggacaggccgtttccgtcaaggaaaacgcgagacagggcatcagccatattactgcgaagaatacggcagacgcaattgcccaggcgaaagggctgcttgcgtacctgcccgccaataatttgagcgtcgcgccgattgccgacgcgtttgacgcggctgacgcgcattcaggtgacgtcatgcagtccgttttcgacagcgacagcctttttgagcttcagaaggagtatggacagggcgtcgttacggcgtttgcaaggctttacggcagcagcgttggtgtaattgtaacaaacggcggtaccatgagcggcgaggcctgcgaaaaggcggcgcgttttgtgcgcttctgcgacgcgtttgcgcttcctgtcattacctttgcggactgcgagggctttgaaagcgtaaaggacgccgcgaagcttactgcggcttatacggacgctacgacaatcaaggcgacggtcatcacgggtgaagcttacggcgcgttttatatggcggtcgccggaaccggcgcaaacaccgacctgacgctcgcgtggacggacgcttccgtttccgcgcttgctcccatcaccggcgcttccattgtatgggaggataaaatgaatgttcccgcaaaagagcgggaagcgctcgtcgaggaatataaaaatacacaatgcagcgtattccaggccgcggcccagggctatgttgaaaatgttatcaacccggaggagactcgccaaagcctcttcgcggcgctcgatatgctcgctggcaagcgtgtgacgacacttcccaagaagcacggcacaatctaaacctgtcatttgttatctgttttattataaattaatctgttaaaaggaatgatacatgatgaaaaatttgaagattaccgtaaacggaacggcttacgacgtacaggttgaagaagccggcgcttcttccgcgcccgcgcaggcttccgcccctgcggcagcccccgttcccgcgaaagcggcggctcccgcaccggcagcgccgtctggcggcgagcctgtcaaggcgccgatgcccggtaccgtggtttctatcaatgtggcgcccgggcagaatgtcgcggaaggcgacgtgctccttgtttttgaagcaatgaaaatggaaaatgaaattatggcgcccagagccggcgttgtcgcgggcgtgaacgtaagcaagggcgagagcatagaagccggtactgtgcttattacactgaaataaccgactgggctttcactttataccggaaaggattggattacacatatggctaagaaaattctcataaccgagacagtcctgcgcgatgcgcaccaatcgctgattgccaccaggatgtcgacggaagaaatgctgcccattctggacaagctcgacaaggtcggatttcattccctcgaatgctggggaggcgcgacgtttgactcctgcctgcgctttttaaacgaagacccgtgggaccgcctgcgcacgatacgcaagcactgcccgaacaccaagctgcaaatgctgttccgcggacagaatatgcttggataccgccattacgcggacgacgttctggaatattttgtacagcgctctgttgcgaacggcatcgatattatccggatttttgacgcgctcaacgatattaagaatttaaaaaccgcaatcaaggcggcgaaaaaggaaggcgcgcacgcgcaggttgccatttcttatacgacaggccctgttttcaatacactttattatgtggattacgcaaagcgcattgcggacgcgggagccgattccatttgcattaaggatatggcggcgcttctgaccccgtacgagacgagaaagctcgtgggcgctatcaaggcgcaggtcgacctgcctatccagcttcacacgcactatacgtccggccttgcctccatgtgcctgctcaaaggcattgaggcgggcgccgatattatagatacggcaatgtcgccgcttgctctcggcacctcacatgcgccgactgaatcgatggtcgccgcgcttaagggcaccgagtacgataccggcctcgacctggttctcctgaatgaaatcagggattactttatgaccctgcgccagaaatacctcgacaacggcctgctcgacccgaaaatgctcgcggttgacgcaaacgcgctgatttaccaggtacccggcggtatgctttcaaacctgctgtcacagcttaagcaggcggggaaggaagaccagctgaccgaggttcttaaggaggttccgcgcgtcagggaagatgccggttatccgccgctcgttacgccgacctcgcagattgtcggtacgcaggcggtgttcaacgtcattaccggcgagcgctacaagatgtgcaccaacgaattcaaggatttggttgccggaaaatacggttccacaccgatgccggttaaatcggaattcaggaagaggattatcggcgatgaaaagcctgtaacctgccgtcccgctgatttactcgagccggagcttgaaaagctgcgcgccgaaattccagaatggattgagcaggaggaggacgttctgtcttatgcgcagttcccgaaagtcgcgcttgatttctttaagaaacgccgcgacaaaaaggcgggtattgacagcaggcatgtcgatatggagaataaggttcatccggtctgataaaatcgtttcaaggctttgtcggaataagtcaaaaaagaataagttttgtcgatttttcacaacagaatcaaagaattgccgcggtgcgttttgttatcttaaacaaaaacgcaccgttttattttatgaagtcgtgtgaaaaatgcacacattcataaaaaatcaaacagaattcgtctgtgcataataccgaaaattcgtttattttatacatacttaaagttttacaaacttagaataccgtcaaattaaatattgacattatacttataaaaatagataataatgttgtaagagagttgcaaattgtttaatcatacaatttgtactttcagtgcttaacgggataggaaaaggatgaagtttcacctggttaaagtggagatagagtaagatttctgttacaggtaatccagaaatatggtattacattcaaaaacaattgtaaaagatgatgaatcttttgcaaaatgagtgaatatacatatggcatggattaagttactcgaaaccatatccactttaaaaaacggggtgtaaacatgaaaaaacggtatctacgcgcagggcttactttaatcctttcgtccacggtcctcatgtcttccttcagcgcggccgcacaggccggcacaggtcagtcggacaacatcactataccggacagggatgtacgggacggcattgtttacagcagcgcctatcttgactatctgtctgccgccgagcggggggatacagagaaatacggcgatgtaatccccgacagcactcctcccttggattctgccgcggtaacgagcagccagtacctttccggtacttcacaagaaacatttgaagcggtctacgacccgcgcacgttgggcctggtaactcccgtaaagtatcaggggtggagggctaactgcggtattttcagcgcgcttgccagtatggaatcctttgcaatcaagccgaacaagcttgataaaacctacgatttgtctgaaaattattttgattatatgcttggctccaacgcgtttggagacgatgtaatgaacccatacgcgcctgaatacaggccgattggtgtcgacgccaatatgggcgcccgggaagaggataccttctattccgcggtactcaggggagcaatccttgaaagtgagttcccttatacgccaaaatccaccgtgacgctggaggacgactctattttccatacggagccctccgcatatatgtacggctatatatatgaacggcagattgaccgtttagttgtaactcctcagattacccagaacaggattaaggaaatcaagcggctcgtcaaagaaacgggcgggtgcgtgctcggtatcaacccttaccacgaccattccacttcggaatcgcaaacgccaaagtgcacctacgcgccgcttaccacggatataataaacgccgggcattctgtctgcatcgtcggctgggatgatacgttcagcaaaagcaatttcgtgctgaagccggaaaacgacggcgcatttattgtaaaggacaacggcatgagcgaggatgtcagttacttttacctctcctatgaggactattttgtaagcaccggcgctttgaagacggtttccgatatgtcttcggtaaagcgttatgataatatttacagccactcgatgaagtctccggtagtctatcgagtcggaaaggaacagcctgcactctatgcaaacgtttatgacgtaacggatggcgccgcgcagcagctcgaggcggtcggcgtctacaccttctatgaaaatacccaaataaagatatatgtaaacccactggacggcacgctgtcaaacacaggccttatcgaagcctacagcggcaccatcaaaacaccgggctacacgacggtaacgctaaacgccccggtttcgcttgcaaattcaaacggtaaatacgtggtcgcggttgagctgatttccgaatgctccggcgatgacagcaacttctatttgccagtagaacaaaaggaagtgaaatgccaaggcgatccgcaaaactggacctaccgcccctacacgcctggaacgagcttttattcggcggacggcggcgcaacgtgggaggactggaccttcaccggctatggcacgaagtacaatttctgtattaacggctatacaaaccccgttcccacacaggacagcgaggcgcttgacatcaagttctataagccgtcgggctgggataataatatcacgattaagctctggaatgtagaaaaaatgaaggccggaagctttgcgatgaccaatttgggtaacggcgtgttcggttacaccgcaaacggctttacaagggcgacgttttccatttcggacggctctggacatgtgagcgcacaggctgacgcaagcggaaaggtaacctttgcagaaaaccgaattgtcaaaagagcagcttatccaataaaaatttcgttcaaaaagccagtaaattggaacgataccgtcaaagtttactattatagtaataacgaggatgaagtggagctgaaggcctggcctggttatgccatgcagaatgacggcggcggctggttcagctacaccataaccgacatggacgacgcccgcctgctctttaccgacggcacgtcccgccaggaaccggcattgctccagcctggctatgaagtaaaatcggggcagaattttatctatcaggaccgggaagctttctatgaggacgatacgccgcttaacgtacagttccgcaagcccagctcctggggaagcaatgtttatatccaattgctcgaccgttcctcttctaagcttgcaatggcctgcaatgaagacggaatttacgaatttatagattcggatttaacagccagcagcatcattatcagcgacggaaacggccatcagacagcgacgctcaaggccgcggggcttgtcaccgtcaaggataaccacgtgttcgcaaggccgaaaaaaccaatcgaagtgtatttccgcaggcaaacgagctggtggaaggacatcaaaatctactattattcaaaggcgagctacaccgaccttaccggctggccgggaacaagtatgacaaacatagggctgtggtggtaccaatacaccataaccgatatggataacatacgcgtcatgtttacagacgtgaccaaccagctccccgggccgggggcagacggtatcgctttacactcgggcgagaggctcgtggtcaataaagatggcacgtatcgaattgaatcgactgatcaagaggtgattttagatgaatattaaaagaaatctaaaaggggtggcaggcgtctgcctggtcgtgatgcttctgatttcttccttcagtatcacggtatccgcccagggcggcgaccctgcacctcatatagtagatacaagagcattaaatgaaattgtgtgggatatcgataatattacgccatggatattggattactgcgacgaaacggcgcccgcatattccgcctttcttgaagctcgcaaaaccgcttgggatattcgtgaaaacagtaaggaagcaacccagcagcagatagacgaggcgacggaaagcctgcgctctgcatatcttgccctggaaggtacgttaagctgtgaagaagagcaggctctaagcctgaatcgaaatctttcgatggcgcaaacctatatagagcatgatatttttcgtgggcttccgcttccaaatgatattaccgcggaatcttatactagaatgggagaagtgagagactatatctctcggctttccactcgaccgccggtaccggaagaactgctcggcgccgtaagaatgctgcaggaagcaattgctgcaatcgaaattaataacgcggactataccgtattgcgggcggtctggcaggaacaatatgatgttaaggaagtatcttggcaatataccaagaattcctatgagagatatattgaaacctgccacatctgttaccgtgaatttgaatgtattccaacgcaggaagaaaccgacaagctggttgccagaatccaagccgcaaagaatgcgcttgttttaaagggcgacaacgaccaagacggtaaaatcagcatcggcgatgtgacgaatatccagaaggatatggcgcgtattgaaattttggaaggcgatgcatatgatgcggccgacgtaaactgcgacggcgaaattaatatgcaggatgtcatcctgtcgcagaaatacattgcgaaaacaatcgaccgttttcccgataattcagccgcataaaatttatcttcaatagattcatcaaatcctcatggaattatttccggtgcgcgggctctgcgaaagcagggcccgcgtccttttttgttgccgcataaggcgttttgtgctacactggacaggtaaaaaccgattgcgggaggcggcaatgaaaaaactgggaattgttgtgctttgttcgctgctgtttttcttgaattcgtgcagccccggacgcggacagaatgaggcggtaacgcaaaagctgtttggtatggatacggtcgtcgatattaccgtgtacgggaaaaacgcgcagcaggccgttgcaaaagcgaacgaagagcttgtacggcttgaaaatttgctatccgttacaaaggatgaaagcgatattgcgaaaatcaataagaatgccggaacaaagacccctgtatccgcggaggtaatggaaattttatctaaggcgcagatggtatcaaagcaaaccggcggaattttcgacgttaccgtatatcctgttgtgaaagcatggggctttacaactggtgagcgccatattcctgacggccaaacgcttcaagcgctgctcccctatgtggattatagaaagctttcactcgatttcaatgaaggcaccgtcggtctggaacagcatatgtcgattgatttgggcgggattgcgaaaggctatgcatcacagaaaatagcggatacgctgaaacaaaatgggatacaaagcgctgttttaagcctcggtggaaatgtacagactatcggccggaagcctggcggcggagcttggggcgtggcggtcgaataccccggaacgcaggagcattttgccagggtagacgtaggggagacctcgcttatcacctcaggcgcgtaccagcgctattttgaagtagacggaaaaaaataccatcatatcatagacccgcgcacggggatgcccgcggatagcgggctgaaatccgcaacagtcgtctgcggcgaccctgtgctgggcgacgcgctttcgaccgcgctgtttatcatgggcgcgcagggcgcgcaggagtattaccagcagtacggcgggtttgactatatccttctgaccagcgatgatgatgtatatattacaaaaggaatcgagaaccggttttccttatcaaacggttatcaggatttaaagcttcatgttgtagcaagggcggcttcatagacgaagccgcctttttgctatcaggaaacattttaactggtttatgcaacattctcacctgtttacaggctcaaatacggttataatgaggctgtaagggcaaggccagggcagcattaaacagcttataaaacaggaggaacagattatgggcatcgttttccatgagggcagcaagacctttcatctttataataaggaaatcagctatatttttaccattttaaaaaatggctcgcttgggcagctgtactttggcaggcatatccgtgacagggaggatttttcccatttgcttgagctgcagtacaggccgctttcaccaggcgtattcgaggaggataaatttttctctctcgaccagattaagcaggaatatccaagctacgggtcgagcgactacaggcgccccgcatttgaaatcaaacagcccaacggcagcaatatatcggcctttgcataccgctcgcaccgcattttcgaaggaaaagagccccttgcgggactgcccgcgacgtatgtagagcaaaaaggggaagcacagacgctggaaattaccttggtggatgagctgctccatgcggaaatcattttatcctatacggtttttgaggactacgccgctgtcgcgcgaagcgcaaggtttaccaataaaggcacggaggaatacgatttgacagcggcgatgagcatgtgcctcgatttgcccgacagtaattatgagtggatacagctcagcggcgcatggtcgcgtgaacgcagcattaaaaaaaggatattgcagcagggcatccaggcaatcgacagcgcgagggggaattccagccacaaccataacccgtttatcgcgctggcgcgtccgaatacagacgaatttacaggagaggcgattggcttcagcctcgtatacagcgggaattttcttgcacaggcggaggtcgatacgtacgatgtgacgcgcgtaatgcttggaattaatccgtttgcgttcacctggcgcgtggagccgaatgaaagcttccagacgccggaggcggttatagcctactcggataaagggctcaatggaatgagccagaccttccacaagctatacaggacgcggcttgcaagaggaagctggcgcgataaggtgcgcccaatccttatcaacaactgggaagctactgtcttcgattttgatgaggagaaaatccttgatattgcaaggaaagcgagcgaggccggagtcgaaatgtttgtactcgacgacgggtggttcgggcagcgcaacgacgaccggcatgggctgggggactggacgccaaatttacagaagctcaaaagcggtatcagcggcatttcacgcaaggtggaagagatgggaatgaaattcgggctctggttcgagccggaaatggtcaacaaggaaagcggtttgtaccgtttacatcccgactggctgcttcaaacgccgggcaggagcctatcccatggcagaaaccagtatgtgcttgatttttcccgcacggaggtcgtggactatatttttgagagcatgtcgaaggtactgagcgaatcgaaaatttcctacattaaatgggatatgaaccgctgtatttcggaatgctacagcgcgtccctgccgccgcagcgccagggagaggtatttcaccggtatattttaggtgtctaccgtttatacgaacgattgattgaagcgaaccccaatattttatttgaatcctgcgcaagcgggggcgggcgcttcgacccgggtatgctttattacgcgccgcagtgttggacgagcgacgacacggacgctgtggaacggattaaaatccagtacgggacgtcgatggtttatcccgtcagcagtatgggcgcgcatgtatcgtcggcccccaactggctgacctcgcgctatacgccggtaaaaacgcgcgcggatgttgcgtttttcggcgcgtttggctacgagctcgacctcaatacgctttcggaagaggaaatcgggcaggtaaaagcacaaatccaatttatgaaacagcacagggggctaatccagttcgggaccttctaccgcctggaaagcccgttcgatgggaactgcgcggcctggatgatagtatcggacgataaaaaacaggctgtcgttgcgacataccgttttctcaacgaggtcaatacgcattacagaaggctcaggctccacggcctttgtgaagatatgctttatgaaatagaggaatccggcctttctctttatggggacgaactgatgaatgccggccttgttacgagcgattcaagctccggcgagccgcagcccggagacagccgcgcatacgatttctattcgcgcctatacgtgctgcgcgcaaaataaataatcccggtacattataaaaggacggcattatgccgtccctgcctggtttcagatatcatcaagtttttttacgctatgtgaaatttcgttcacaagcgttttgtgatgtgctttcctgtattcgcttggtgctttgcccgttttattcttaaaggtcttagcaaaaacgagcgggtccctgtagccgcaggaaagcgcgacgctttcaattgaaagcgctgtaaaagagaggagctcccgcgcgcgggtaatgcggaacgcggtcaggtattcctggggggattttcctgtagcttcgcggaaaagacggtacaggtagcttcggctaacagcagtgtattcggccacatcgtttaccccgatggggtttgaatagttattctggataaattcgaccgctttttttacataaaggttgctcttgtccgttcttttttctgtgtcggtaatggacgcagcggtttgcgcgagcacggaaaaaaagtcaagcagaaggctttggagcttgaattcattgtgggggccaaaggtattgcgcctgagcatttcgagcacgatttccttcaagcgttctccatttccacaggtaaataccggttcggcgcccgccagccccgcgttctttaaatattcccggacgttagccccgttaaagcccacccagagataacgccacggcgtttcactgtcggcacggtaaaaggtctgtacgtcgggcggaatcaaaaagccctgccccgcgcacagctcgtaggtatccccgttaatctggtacacaccctttccctctaaaatatagtggagaatataattggggcgtacggcgggtccaaagctgtggagcggcttgcatttcgcatagccgcagaagcacaggtaaagctcacggaacatccggtccggcagctgcatgacatacgcgtcctccataactccagctccttctgtttcattctgtctttattttagccggtttttctgttaaagtctatattagggggaaatagaaaatgaaaagaggcgttttttgtgaaccatattgaaaagaaaccgttcggaactgcgccggacgggaaagaagtgttcctgtttatcctcgtaaacgaaaacgggatgcgtgcggaaatcctgaattacggctgcgccgtgcgcgctttatacgttccggacagaacgggcgtaccgactgatgtggtgctcggctacgacgggcttgacggttatgtccggcaggataaatatcttgggtgcattgcggggcgcgtttgcaaccgtatagcaaagggtttgtttaccttaaacggaaaagagtaccggctggcctgtaatgacggtgaaaaccacttacacggcggcacagagggctttgacaaaaaagtttttacgccggaaatactgggggataagctttgcctttcctataccagccccgacggggaagaggggtatcccggaacgctcaaagttatggtgacatactcgctcacgcgggaaaacacgctgcgtattacctacaaagcgataagcgataaagatacgctttgcagtctgacaaaccattcctatttcaatctcgatggctgcgaaagcggcacggcatacagtcaaaatataagaattaacgccgatttttacacacctgtcaataaaaacctgataccggacggcacgctcgcgccggtagagggcacgccgctcgacctgcgcagggccgtgccgcttggcagcagaattggggcggagcatcctcaattttcgtttgcgggaggatttgattttaattacgccgtaaatgggtacacagggcaattccgcgaggcggcatatgcgcaaagcgccaaaagcggtattacgttgtccgtatggagcgggctgccgggcatacagttctattcagggaattttttggagggcgcgcctgccggaaagggcggcgtgccatatcataatggcgatggcttttgcctggaaacgcagtttttccccgacgccgtaaaccatccaaacttcttttcggcatttttgccggcgggaaaaaaggccgaaacagtaacggagtaccgttttggtctgattgaataaaaaaagcaagcggcagggcgcaaatttgattttgcttcctgccgcttgtattttttatgaaaaaatgcataaattttgagaatcaaattaaataaaaatcgaccaaaaaagaaaaagtgaacaattctattcccgccatgttagaacgtatttgttaaaatagaaccaaaatctgttaattttttaacaattattgactctggaatattatggaatataataataaacagtgacttgaaccaagcccattattttacgacagcatgcgtttacatgtattaagaacgctatttttttatttattctcatgtaaacgtttacttggtgaatacgttaaaagaattattagctttcaacaaaattatatgaaggaattgcgtggaatgaacttccatgttttatttcattttattgctttagctagttatcattctaccttaagaaaggcggtaagcataatggtacctgtcctcggaaaaatgcggcatggcgggaaaaaggcaatggcgctgctcatggcggtcctgatttttctttctgcaaccgttgccgcgcttacagcccttgcgaccagttcggcaagcgctgctgcggatgactatctttacatcccggtatcgctttacgattataaatacaacaatcaaattgaaaattcgggcgcagcgcccgatgcgggaacccgctctggcgggttcccaaattaccttccatatggaaaattcaatgaacaaattgcccggtcaggttacagcgtccccctgtacttcggcgatttttataatggatatggctcggaaaaccttaccaattttaaagacggcgcgaaccttgcaaaccaagggaacaacaacgcggccgcgctcggcttagtcgacgataccctggctgacggccggcttacgcagaacggcaaggagcttccctacttcagccgcgagtggttcaacgaaaaccgttctgagggaaacggccggctcaataccgttacctttgagttttactccgacggaagctggtggcatgattccgccgacgatacaaagcgcagctttgtacagggcaatacttatacatacacggccggagccaatggctcgagaacgtttatacagaccggaaagggagacgcctcccataacaccacgtttgttatcaatctggacagctcaaacagctggagcagcaaaccggaaagggtaaggctccactttacctcggcaaacgggaaaacggcggcacaggaggttgcggtcagctccagcgggacacagcgcagggcggcgtatgtattagaaaattcgtccgattatgcggttacaggcacgacgtttgcggatatttatgaaaacgtggagtttccgttctaccagacagtgcgcggcggcgtgacgtattatgaatttgattcctcccagaaaaacctctattttgacgggacaagcctcaactataccaacaacgcggtatacgatacggccatgtcgggcggaggcaagcccggattctttcccttcaacaacggcaacccctcggataagggtaagcttgactacggcttcggcgcaaagtttgaaatcccgttttccatgacggacaatggaaaaatcaacggaagcgacattatatttgagtttaccggagacgacgacgtttggattttcattgacggaaagcttgtgctcgatatgggcggggcgcattccacgagcgaaggcaagattaatttcaggacgaaggaatccacggtaacgacaggcgtatttgacggcgacacaaacgatagatacgcccaggtcacaaagccttatacatatgatttttcgaacgccgtcgacttttccgacccgacacagacacataccctcaccatgttctatatggaacgcggcatgtgggaatcaaacctgaagctcagcttcaacttcccgcagacgaatacgcttacggttgacagcaatgtttcttttgacggcgtgaacagcgcgctcctttccgatacaaaaaaagcggcggacgacaatgccttctcttatacgcttgagaacaagggctctactgaaaacggcaattccggccttacttatccggaaagctacgacgttgtcagaacaatagaagggcaaaaaaccatactcaataaagcgggcgaggcgccgcaggccaggcatacattgatgcttgacgcctcgaaggcgggctgggcggaagcatacgcctatacctggaacggcagcgaagcgggaacctataccaagatggctgtggacgcggattcggggtacttttactgcgaccttgcgtccgtccctgagaacgtgatattccgcaatacgaacggcggtacatggacaaatataaattctacggacgacctttctccagcggggaacaacctctttacaatcggggataccgatacctcgcagagcaggtggaaaggaagctggagcagctacggcggaagcacgcccgagctgggggacaattttataccagacgggaacaactgggctgcggttgagccgactgtgattcacggcttatatgattctttcgcggcgccgaaaaccatgacctccagagggcaaaccctgatgtacggacagaagatgaagtatgtcaaccagtttacaaaaggcagcgacatgcgcctgcggcaaagcgacgacctgcaaaagccctcccgcgcagaggacgccgctgtccagtttaatcccagcgggaaaaagcttaccgactactacagcacttcctggaggcttttggatgttgacggtattgtgctcggctataacgccggcaacggatatattaccgataacctgcggtcgtcttccgatgacagctttaatttttcaaaccttgaccaggacgacgcggtcagaagcaccgcacagacggtaatctatacaaacacggtaaagacggcgaacatcgcgttttccaaagacttgacggctcaggccatgaacagcggcctgtataatccggatgaagaatattcatttaaggtcgagctgagcaatatcttcggcagtgacgatagtacattccgtacctatcccgtggaatattcgctcgacggcgtgccgatgactgccggcggcgacggaattattacgcttaaaaggacgcagagcgccgttattacaggcgttcccgtcggcaccaaatataaggtgacggaaataaatatcccgggctacctcaaggttgaatccgtcggcggagatgaaacgaagagcatattaagcggcacgctgtcccagtttggcgtaaacggcagctttatcaacggcctcgtttccgcgcagattacaatcactaagacgattgacgagctgtattacggagcaaacgataacccggccggactatctggaaacaccgcgattacagaaaccaatataccgggcgacgcccatggctacgaagaattcacaggcgcgcagcagagttttttatttaaggttgagcagttcgatacaagcgcctgcgaaggcgcgccgaacaaaacgtcgtttgtcgtcatcagctttgacaagacggacggcatgaacctgacaaagtcggagacgctttcggtggacccgaccaaatactaccgggtgaccgaggatacgaagcttgcgtggaggtatgactttaaatcgctttccatctacgacacgctgggaaattccctgaaagaagggaacgcggctatcctttacggcagcgaagtaaaccccgaagccgtgtttgtaaacgctaaatcggcagacaaacacaaccttgagggagacgcggcgcttgcgcagaacaaattgaaggcagcgccctgaatagaaggggagggggaacgcgcttgaaagcattcagaatcatcgacagggtatgtaccggcataattgccgccgtactggttcttgttttgctgattggttttctgccgcaggtgttcggctataagccgtacacggtgattagcgggagtatggagccgcagtaccaggtcggttccctgatttacgtcaggcaggttccgcctgaagaaatcgatgtgggcgaccccgtaaccttcacaatgggcggaaagactatcacgcaccaggttatagaggccgaccgcgaaacgaacaccttcataacaaagggaatcgctaaccaaaatacgaccgaaggccctatcccgtatgcggatattataggaaaagcaagcggcttttccatacctttcgcgggctatgcgtttaccttcctgtcatctataaccggcaaaattttgcttctatgtgccgttggcatactaatattgctcgtcctgctggaaaagattttttccggcgggaacaaaaaagaaaaacggtaaataaatgtggcttgtttggaggtggttttatgagggaaaatgatacaggtgagaagaaaatcagcgcgcttcccggcaaaaaacggattatcgcggtgctcctgctgctgcttgccgccggcgctgttaccgcggcgacatggggcttttatacggcgcagagcaatcacaaaacaaacccgttttttccgatgacggtgaccgatatcgatataaacgagccgaacggctcagagtatacaatggacgccgcaggaacggtcacaacaaaaaaggtcataatagagaaccctgacggcaacgcaaagaaacccgttttcatccgtgtggctgtcgtaccctcaataaaagacaagcagggcggatacctgaacaaagaggtagcaattgaccccgcgactgcctttcatgagaactgggcactccatgacgggtattattactataaatatcccgttatgcccggagaccggacggctgagcttttccaaaacagcacggtaacgctcaattgcagcctgcgggatggcgaatatgtccagctcgacgtgatagccgataccatccaggcgacggcaaacggcgataaaacggaagcgcttaccacacaatttgccagggaagcctggaattatgacagctttattctggaataggactaattcaggaaataacccgaaaaatgtgggttaatttatatcagcaaacattacttttaggaggaaaagattatggaaagaacaaaaaacagcaggctgaagaaggtgctgcttgcagcggcggccattatagtcgttgcatccctgacggcgggacttaccattgcccttttgtcagacaccgacaccaaggcgaacaccttcccgggcagctcggcaatcaagcttcagcttaacgaaccaaagtgggacggctacaccgacggctccggcgacggtacgtcagtaaacccggcatacgccggcgcggatacgctcggccttaaaatagcgcagagctaccagccgaattctgtcatcccgaagaacccgtcacttaccaatatttctgacgacagcacggtcaacaatgaatatgtcgcaatgaaggtcgtttatcaggtacgcaaaagcacgacgggcgacgtagcgacacagggagattttatcaaccttacatacgaccagtttgcgagcatagcgacaatcaattttgatacggccgcttggaacaaaacagcgaccacagccgacaagggcgacgtttactgctatggcagttccactgcgctcacctctgtagaaaaaacgctttctaccagcgagctgtttacaaacgttacagtaaaagacctgacgatgaatccgaatgctacgacagagcttgatttgggcggcggcgaagttatctcttacgcggccaactgcctgcccgagtttagggtactcgtttacggctcggcaatccaggcagacaataataccgatacctatgcaaacaacgcggcggcgctcgcagcactgtttgcgtaagccggacccgaacatcgctcataataaaaaatcggattaatcgaaacggaggatttttacatggaaaagacaaagcgttcaaataagctgctgaaggtgaccctgtccgtcgtggccctcatcctggtagcagctgttacatatggcattactatggcgttcctgaccgcaaaatcaaacgacaagacgaatgtattcacatccggcgacaacgtcgatatcaccatcaacgagccgaagtacgagcttacccaagaccacacctacaagccgggcgacatccaggacaaggacccgtctgtcgagagccttaaggaagaggcttatgtagccatgacggttgagttttacgcaaaggctccgggcgctgataattataccggcccgatgacctatgcggatttcaaggcgcagtatgcaaacatcggtattgaaaaggaaggcgtattcgcagccggcgagttcaatccgcagtggtatgcttccgccgataattcggatgcttccacaaggcttgtgttctattataagggcgacagcgcggccgacgagcttaaggcggtcggacagggcggcaagacagaggagctctttacaaaagtgaagttcaacgacgacatcgcgacggttgtaaacgcagcggcccccgaggtccgcattgacgtcaaggcatatgccgttcagacgacaggcaccagcattaccgacctgaacgacctgatgggaatctgattttattgataggttataacaacaaccagacggggtgattgcttttgaaaaagaaaaagattatatgcatagccgcggcgcttgtgcttattgctgttctttcagcgggcgtcaccctggcggcgtttacagcaagcaaggacacgctcaacgtcgtgaccttcggcaacgtacatattaccctaatcgacgaatatacgaagccggaagcgggcgttatgcccggccagacggttgaaaaagtcgtctcggcgaaaaacacgggcagcaatacggcgtttgtccgcttaaagcttacaaaaagctggtgggaaaacggccaaaagcgtgaggagctcgacccctcctatattacccttgatttttcaaatgccgataaatgggcggagggccaagacggctattactactatcaacttccgttaaagcccggcgaaacagcggaaagcctgattgattcgttcagcctgcccaaggattgggatatggacggctacacgaagctcgacggccatatagacgcccgcgcggaagcggtgcaatccgaaaactttacgccgcagctggatgatgcaggaaaaattaccggctggaacgacattgtcgtagaagaggctgtagaccgtgtccctcaattaccgaaagtcgaaggcgataccggaagcagcgttattttccagaatgacgccgataaatttgtcacactcccaggcgaagacctgttccagggcttcaagggcgtaatgccgggcgacaccaggacacagcaaatcgatataggcaacgatgacgataaaacagcttatatctacctttacgccttacaggcagacgaaggccagtttgaagacgcacagcagaaagcaatatccgacgagctaatgaagctgcttcagatagagattacgcaggcttcggccgacggcaaggcggaggttctctataaaggaaagctctatggagaggacggaggcttcagtatgtacggccagccccaagcggttagcctgggcagcttcggcaagggcgaacgcgcccgaatcaaagtagagctgaaggtccccgacaacttaggcaaccgttatgcggacgcagcggcaaaaatcaaatggattttcaccgcacagcaggcagaaccggataacccgccgccgtcaccgcccgatatcgtagtcacgggggatgctttcgcacctgttttgccaattgccctggcagccgcagtgctttcgctggcagcggcaggcgccatgctcttcataaaaaagaagaagcaaaacgccaaaaattaatttagcttacgacgaaatatatatacttctccagcggcccgtcaggaatctacccgttcctggcgggccggccttttgttttttgaaagaaaaagaaaaaacatggaaatagctgtagcttaattccataaaaaaggatgttgtaaagaagctttatatgtgacaaaattaaaaagtaaaacaggtggctcgcgctttgttgacatatttcccgctccctcttataatagtataagttaataaaaattgtatatatgctttgtagattatgcatatatcgcgattgtgtatagatattttatttgaagggtgactgtaatcatatgggtattacatcgggacaaatcattaaactgttaaaaaagaacctgctccttatccttatttgcgcggtagttcttgccggcgcttttttcggttatacaaaattgtttattgcaaacacctaccagagctcggtgaaattttgtgtttccactacgctccagggggggaccgcctccgatgttgtgacacagcttgcttatgagcagcgccttgtcaatacgacaatagaaatcctggacacaaacagcttttattccaaggtggccgataaattatcccagcgttattctgccggccagcttgaaaagatggttttattctcaacgctcaatgataccgaggtgttccaggcacaggtaagcgcaaagagccagacggataccaagcttatcgcagatacgattgcggaaattgccccaacggtaattacggaatataagaaaaacgtccagcttaaggttgtcgatccggctctcgtcccgcagacgcccgtcgcgccgaacccggttatcaacaccgcactcgggtttttgcttggcttggttttgtcggttgcctttgtcctgattcggaattattttgatattcgcatcaagtcgtcggatgaggagtttaccgctctgaatatcccggtactcgcatatatccccaattttgaaagcatgtttaaacagaacggcacggttcagtaaagacgccatagaatcggcagacagggagaaagttatatgtttaaaaaatccagccgtaaggctgtccgttccaaagatgataatacggcgcttaatttccagataaaggaagcgtataaaacagcgagaacgaatctcgtcttttccgtgataaaagacgggtgtaaaaagattgtaattacgagctcctataattctgagggtaaaacaacctcagcggtcaacctggcgattgctcttgcccagcaaatggacatcagggtactgctggtcgactgcgacttgagaaaaccgaaggtcgacaggttcttcagccttccggccgctccgggccttaccaatgtactcggacgcatcaatgagcttgacgaggtaatccacaagaccaaggtggaaaacctggagattctgtgcagcggcgtgataccgccgaatccgtctgagctgcttgccagcgaagcgatgaaggagcttatcacgaagctggagtccaattacgattatattattttcgacacccccccgattaacgtggttgtagacgcgctgcccctgattacagacagcgacggcgtcgtgcttgtcattcgggaaggaaagtctacttatccggatttaaacaagacgctgactacgcttaaaaggattgacgcgaagatattgggcctcattatgaatggggttgagatgaaaaccggaaaggaagggtatctttaccggtatgaaaatcaggtttgattatgaaaagtgataggggataagtctggaagaggtttaaggaggagagcgcatgaatacggtaagagagaaagagtatgtacgaaacgattcccgcgcaaatacatactaccttgcaggtgcgtatgccgcggcggtatcggaagaagaaattgccccaattgaagatagtgtgtacagtaaggaacaatacggcgattttggtgaagaaaaaaataagtttatgtatcgcgtcataaagcggctgtttgacattgtttgttccgggcttgcgcttatcgtgctgtcgccgttctttttggttattgcgttgattatcaaggcggaggatccagcgggtcctgtgtttttttcgcagaaaagagtcggtatgggcggcaaaatcatccgcatatataagttcagaagtatggtgtcaaacgcagaagagttgattgcacattttacgccagagcagcgcagagaatatgaggagaattttaagctggagaacgacccgagaattaccaaaataggtaatttcctaagaaaatcgagtcttgacgagttgccgcagctgcttaatattttaaatggaaccctaagcatcgtaggtccaaggcccgtcgtacctgccgagcttgaaaaatatggaagtatgcaggataaattcctcagcgcaaagccgggacttaccggctattggcaggcaaatggacgtagtgagaccacttatgatgaacggattgagatggaactgtattatgtagacaattgcagcttctggcttgatttaaaaattatttttaagacggtcgctgtggtactcacggcgaagggagcaaaatagaattgaaatcgaaaaataggatgtggcgggaatgaatgtattatatgcaagcgatgataaattttcaggaatactcggcacatcccttgtttctttgatggaaaataaccgggacagcagcgaaatcaatgtctttattctcgatgatgggatttcgcagggaaataaggaaaagctcaatatggtttttaaggattacggaagaacgggcgtctttttaaaggtggatgacgtcgagattccggaatcctttatttctgaccggtggccaaaggtcgcgttcatcaggctgtttatttccgagctgtttgacgagcaggtaagccggcttctttatcttgactgcgataccatcatcaacggttctttggaaccgctttggcatatggatatgggagagaatattatagcgggggtgaacgactgcctcagcccccgttacctgaaaaacctcgatatggacttgaacagtacctatatcaacagcggcgttttgttgattgatttggaaaaataccgtaatttttccgtcagggagaaggtttcgcggtttatcgaaagccatgcgggagtgattcaataccctgaccaggatgtaatcaacgcggtatttgaagggaaaatcctgccgcttgccccgaaatataattctattacacttttttacgattttgcttacagcgacatgctcaaatatagaaagcctgtcaaatattatagcagggaacaaatgaacgaagcggtggaagaaccggtcattatacactttacaacgtcgtttttatccctgcgcccctggataaaggaaagcggtcaccgctatgtgggaaagtttatttccttccgcaataaatccccttggaaggacgagcctttctgggaagataacaggagctttgtaaaaaaggcatatcttaaattttaccgcctgatgcccttgcccttttctgtagcgttttcgggatggctgcattccactgctgtaccaatgctgaaaaggaagggataaggagaagaacagtggaaaaaagacattatgattttctggacgcaatgaaggggatgggcattctcttagtagtgcttggccacgtctctttgattgaaccgcttaatacagtgatatatgcgttccatatgccactgttcttttttatttccggatttcttttcttttcctcccggaaggaacattttgcagtgcgcagggtcaaatcccttctgacgccctacttcgttttttctttgctcaccttttgttactgggcgtttttggagcgtaggctgcgtgggcaaaccggtattccggtatttgctccgcttttaaacatctttatcggccaaggcggcaatgagggctatgcgttcaatgtcgtgatgtggtttattccttgcatgcttatgacccagcttatgttttatttgggagaacggtttattaaaaacaggtatttccttgccgccgcgattatccttttgtcggcggcgggttatctttacagcctgttttgcccgttccggctgccgtggtgccttgatgccatgacaatggcgctccccttttacgcgcttggatatatgcttgcggggaaagaaaagctttcttctgtatcaaaaggaaaagcggctgttttgtccgccgtgctccttgcaatcctgattccccttgctcttttcaacggcaaggcggatatgaacaacaacatttatcaaaactattttttatactaccttgcggcgttctgcggaattgcatttatctgggcactctcccagctgtgccggttccgctggctgaaataccttggcagcgcttctttggttatcatgtgtgtgcatgagccggtgaaacgtatcgtcatccagcttacagcctctgcgttgcacaccgcgagcgatgcggtcagggtcaatccgtttttcgtcctgctgctaagtgcggcggttgtactggcttgcctgccggtttattacctggtcaagcgattctttccgtttgttatgggaaagtacggcaaatattgaggagattttctgaaaggaatcatccatgctttatttatttgagttttttacgtttacgtttccaaaggcaggcgtgctcgtttcggacgttccgttaacggttgcgatgctcctttttgcgttcgcgctgctttggagcgtaaagggaatccgtccggctatcgataaattccggggctttgcaattgcatatgtactgtttgccgtgtttatcctgattccgatggtaatgagcctgtcgcggctgagcctgtatatggtatctatatccatcgttttgattctgtcaccgcttgcaatcattattggaggcagaatggattttgataaaacagtgcgtattatttcggtagctctgctgattgttggtctttacgcggccgtgcagttcctgtttggaattcaggcgactgaaatccaagggctcaatattgcctatggcgattcgtttgaatcaaagccaatcggattcgggcatggaggcggcggcctcgatgcgcttaaaatgcccgccacctatcaaaacggcaacggcgcgggattgttttatgcgctgtgcctgccgcttatgtttttctggaaaccgcagaagcgctacgattcggttttgcgtattctaggggcaattggcgggtttgccgggctgtttttgtgcggctcacgttccgtgctgataccgtttaccataattgcagtcccttccttaatcgtatatataaagagaaggcttccctccagggcgcagctgttatttgtggcaggcgtgattcttgcattttgcggtgtgtttgcatatttcgcaattgctaacagcgagtttatttcttattttatcaaccgatatattgtacaaacactgtccgaccctacgggagccggaagaacggtgctgtatcagaagtttatcgacgccgtaatggggcttggcgcctgggactccctgcgctttattttcttcggaatggactggaaggacgcgcagatgaccgaaggcgttatctatgtactgagctattacggtgtattcgctttcctttcatttctatccgttcttatttatccgctcgtctcggtttttaaaaagaacaagctgctttctgttgggctaatcctcatgtttattgcttttttagtagatacatcgttcctttatcccccaagcttaatcaactatttctttattgcggggctttatatgcagcaccccgaaaagatagtacgggaacatgcgccgcggcttgacgccgcagataatataagagtaggagcttgattactttgaaccataaagttgctgtgataatttgttggtacgggccgtttcccgcgtattttccgctgttcttaaaatcgtgcgctgccaatcctgattttgattttttgatttttacagataccctttacgaaggacagtatcccaaaaatgtaaagccggttatccgcgcctttgccgatttaaaaagcctgtttgagaaaaagcttggatttgcggtttcgctagagcagccttttcgcttttgtgatttcaggcccgcgttcggcgttttattttctgattatctggaagggtatgatttttggggccactgcgatatcgaccagatttttggagatatcggcagcgtgattaatgatgaaatactcagccaatatgagagggtgctttttcaggggcatctttccctttataaaaacaataaaaaaatgaaccgcctgtttgaacaggacggcgctatttatccatataaaacggtgtttacaactggtgaaaattatgcgtttgacgaatttaccggaattttgaaaatttgtgaaaaacagggaataaatttatttcgctgtaaatgcttcgtggactgcgacgttgcctattcacgctaccgttttgtgaacgacgaacgcgataccgcctatcaggttttctactgggaaaatggaaagctataccgggcttacctggagggcgggaatgtcaggacggacgagtttatttacctgcacttccagaaaaagcatcccgtcaaccgggtagcggatatcgattgcccgtccttttacctgctcccgcaggaatttcgggaaaagcagccgggcgcccctggcgcgcaggcagtgaaagagctgtcaggctacctgggggaagaggcggaacaggcggagaaaaaggcttacattaaaaagaagctcggccagtttgcatcatgcagcccgagacagaaaagagtctggctgaaacaaaagctcaaaggataacgtttacatgccggcctggaggagcgtcaaatggaagagaaaaaaatatcggtcgtcgtacctgtatacaacgcgcaggatcatttggagcgctgtgtgaaaggcctctttgcacagacataccaaaacctggaaattattctggtggacgacggctcaaaagataaaagcggcgccatctgcgaccatcttgcacagagggattcccgtgtgaaagtaatacacaaacaaaacggcggcgtttcccgtgcgagaaatacgggaatggaggcggcgtccggcgaatatctccagtttgttgacagtgacgatatgctgtcgcccgatttttgcagtatcatggcaaagctgcttaaagaaagcgggaaaagcatggtgatctgtggataccgtgtcattcatacggcgcttggctatgaaacggtgtgcacaagtccccgcgcgacagtcggcttaaaagagaaggacgctgcttccttttttttgcagctcgacagggacaaggtgctttccatgccctggaataagctttttgtgagaaataaggtcaaaaagggctttcgcgaggatatttctcttggggaagacaaaatctttgtgctggattttttggaggcaaacccggattttactgttacggaagaaattctttatgactattacgtggataatgagggtaccttatccagaaaatactcacaagagcgtatccgctatgtcaaggcggttacggaggaaaccttccggttttgcaataatatgtttcccgcggggtacgacaccgcgtatgtatataccgattttatagattccgtacgttctacaattgatttgtgcctgcgcagcggtgcgccctttgcgcagaggtaccgtaacctgaagtcgctggtgaaggacggggaaaccggtaacgcggcaaagcaaagccgttgcggggggctgcatgcgcgcgcggtagaatggtctttaaaaacgcagtgcacaccgcttgtgctgctttttgctgaggcaaaggttgctgccagaaagcttttggaatggaaaagaaagcttatgaaaagggcgggaaaaccggaaaaagcagaggaagggaagaaaagctgaatgaaaatcggtattatcacatttcaccgtgcggtcaattacggcgcggtactccaggcctacgcattgcagcacgcattggaagggcttggcgcacaggcggaaatactcgattaccgcaacaggtacatcgaatcgtgctacgacccttattcccttaagggaaataaactcaaggcgcttgcaaaaatcgccctgcttggcggggtgcggcgtaaaaaaaacgaagcgtttcgctctttcaataagaaatatctgcgtttaagcgaggctgtgtataaagacagcgaacagcttgcaggggcagaaaaattttacgacgcctttatcaccggcagtgaccaggtttggaacacgagctgcgccgattttgaccccgcctattttctgacctttgtaaaggacaaaaaaaagaaaaattcgtatgccgcaagcttcgggctttctgaaatcccgaaggaatacgaagcggaatataaaaagaggcttgccggctaccggcagatatctgtaagagaagcccagggaagggctttagttaaggagcttacgggcagggatgtacctgtcgtgctcgacccgacgcttttgctcactgaaaaagactgggcggcggcagcgcatgacattccccataagggctatattctgctttacagcgttttggaatccgacgggatgttcgcgtacgcgcgcaggctttcaaaagaaaccggcctgcctgttttgtacctcaatgataaaagctttgagaacagggaccttcaatatgtgcgcggcgcttcacccgaggaattcctgggctattttaaaaacgcggactatgtgattacgaattcctttcatgggacggttttctctgttatttttaagcgccggttcctgtccgataccgacgtaatcaaagaggggaaaccggggaaaaacgaacgttcacagcagctgctcgaagcgctgtcccttacacagaggattttaacggataaagccgatatcaatgcgccaaccaactgggaggcagtcgagcgggagcttgatgggctgagatggaaatcttttgaatatttaaatacgattgtggatgaagaagatggcaagtagtagcaggacaaaaaagtttttttataattccctctcaacgggaatctaccaggtggtcgtaatgattgtcgggttcatcacgccgcgcgtcatgctcgcgtgctatgggtcggaaatcaacgggctggtttcctcgataacgcagtttatcacatattttaacctcgtcgaggcgggaatttcaggcgcggcggtatacgcgctgtaccggccccttgccgaggacgaccacagggaaatcaacggcatcgtatcggcggcgcgtattttttacatacaggcagggtatctgttcgtcgcgctcgtgctcggcatggcatgcatataccccttccttgtaaaaacgccggagcttgccccgctgcttgtggggatgctcgtcgtcatgctcggcggcaagggcttttttgaattttttaccatggcaaaataccgcgcgctgctgacggcagaccaaaagacgtatgtaatttcgcttgcgtcgatagtttacgccgtggtcaacctgattgtaattgttgtgctttcattgatgaaggtcaatattgttatcgtttatgctgctgcgttgaccgcgtttttcgcgcgttccgttattcttgcaatctatgtgcggcgcaactacaaatatatcaattacaaagaagctcccaataaacaggcgcttgacaagcgctgggacgcgttgttcctgcaggtgctccaaaccgtccagatgggcgcgcccgccgtgcttgctacgatttttaccaacctgaaaacggtcagcgttttcacggtatataatatggtgctgacgggaatcaacggtgtgctgtctatttttatcagcggcctgtctgcttccttcggcgacgtgcttgcgcgcaatgagataaagacgctgcaaaaggcttataaggactttgaattttcttatatgtcgttgattaccgtcatctacgcggttgcttttatcatgattatgccttttatcaggctatacacgaccggtattaccgacgcggactataatgttcccttattcggcttcctgttcgtgctcaacggccttctttacaatatgaagacgccgcaggggatgctcgtcatttcggcggggctttataaggaaacgaggctacaaacatctatccaggcggctattcttgttgttggcggcgtcatcggcggctatttctgggggcttgcgggcattatggcagcctcctgcctgtcgaatctttaccgtgtcattgatttgatgttttatattccgcataacgtgacgaagcttccggtacatactacgctgctgcgctatatcaggatgttttttatccttttggttatttgtgtaccgtgtttcttcctccagttcgatatacagaattacttcatgtggttcgtgtacgctgcggctgcgtgtgtttattcaggcgtggtagtcgccgtatttggttttatttttgaccggaagcaaatgttttatgtctttggcaggcttaaaggcatgctgaaaaggggaggctgaccatggaacaggtttttgagaaaaaagagctgtgctgcggatgcggcgcctgcaaaagcatttgcccgaagcaggcgatttcgatggaacctgacggaaaagggttcctatatcccgctattgaccgagggctttgcatcgactgtgggctatgccggaaggtgtgcccgttcccgcagggcttcgtccatccgcaggcgcttccttccccttctgtttacgcggcaaaaaaccgtacggagcaggtacgtatgacaagctcgtcaggcgggctgtttgttccgctgtcggatgttgtattaaacaggggcggcgtagtttacggcgcgcgcttcgatgaaaaccaccgtgttatgcacgcccgcgctcagacacgggaagaacgcgacctgtttaaatcatccaaatatgtgcagagcgatttgaacgaaatcttccgggatattgcggcagaccttaaaaacggaaaagaagttcttttttccggcacgccctgccaggcggctgggctgcaggcataccttggaaaaagaaaaatagacagcaatagcttgacggtctgtgactttgtatgccatggcgcgcccagccctcggatatttgaagagtacaaggcatatatggagaataaattcggctcaaaaatcaaggatttgaccttccgggcgaaatcgaccagcaagagtacgcaggatatgcgtatcgcctttgaaaacgggaagatttatcaggcggctacagcatgggaagacccttattaccggatgtttttaaacaacctgattctccggccgtcctgctacgaatgtacgtttaccactacgaagcgcgcttccgaccttaccctggccgatttttggggtgtggaaaaggcttttccacagtttgaggataagaagggcgtgtccctcgcccttcttaatacttctaaaggagaaaagctatttcaagctgtcctgccgcagcttgaggctgtaaacaccgcgattgagtgctgtgttaaggggaatccaaatctggaacatccaagttcctgtaagcagccggtcgagcagttttggaaggaatacgaaacgaatggctttggctacctggtaaaccgttatggagtacgcacggcgaaggagcgggtaaagtccgcccttgtgaaggggcttgaaaaaacgggcctgtatgagctgataaaaagaaaataacctgcaaaaagcgtctgctacaggcgcttttttattttaaagaataacggggcggaggaacggcttataatactgatagaaagtttctgaaagaagtgttaattatgaaagcgttgattacaggggcaagctcaggtatcggcagggatatggttcgcgtgcttgcggataagggttgggatttgtttatagcagccagaaggctggaccggctcgaggagctgaagggcgagcttgccggaagtaatatcatctgtataaaagccgacgtgtcgacaaaggagggctgccttgcgctgtatgaggaggtcaggaatgaaaatatcgacatgctgataaacaacgcgggttttggagtttgcgggatgttcctcaaaaatgatttggatgaggagcttcaaatgattcggacaaatattggcgcggtccatattttgatgaagctgttcctgcgtgactttgaacggcggggcagcggttatattttaaatacggcgtcgtcagcgggctttatggcggggccggtgcttgcctcttattacgcgtcaaaaaattatatcgtccgcctgacacaagcagtttatgaggagcttcgcaggtcgcatataggcgtacatgtgagcgctttgtgccccggaccggtcgatacggaatttaacgaggttgcgcatgtacggttcagcctcaggggaatgaaaagctatgacgttgcgcgttacggaattgaacaggcgcttaagggaaagcttatcattattccaggcgtacaaatgaagcttgcaaaatttttcggacgatttgcaagcgataaactcatgcttaaaatatcgtaccatatccaaaaacgtaagctatgaagtaagattatatataagaacagcctctccatgcttggggaggcctttttgatgggaaaaccggcggtgtgttttttcgccgcttttaatgttgattgagcggaaataatacatttacagtccgtgtgacttatatcgaaatataaagtaagaggtataacatagaaaaactgcaaacagacttccaaatcaaccttgtaaaaagcagaaaatgttgtatgaattttattccacagaagcggataaatatagactgtttatcgttaaaaaacttttccaaattttacctttcgttaaaatagacaaaaacagcaaacggatgaatattaaactaatattttcttgcattttttaactttatgccctataataataggtaaattattcatggcgttcatacgccttgcacaaaaagaatcaactgctttgcgttttaaggttgatattttaaggaggaagatttcatgaaaaaagtggtaagacgttctgtcagcgtcctgctctccgtactcatggtagtctccatgtttgcggtgggtattacaagcacaggggcggcgtcaaccaatgaggacgctcttggtgcggcaagtattccgttgccttcttacagcgagcctgattcaggaacaatacgctcctatttgaagattaatacgacagggattggttggtatgcctcgtctgatgccgcggcggattacagggcctacagctggcttaccacgggccagaatgtttataacaaagcatggcctggcgagacaatgtccgcagccggcattgctggcggttattatgttgatgttgatcagagtaagggctttaacgcgattatctttaataccgttaagtgggctaatgatgataagcagacaaatgatattacagattttaagacacatggtaattatgtttactatgttccgagtatggtttataaccagaaacaaagtggtacatggaaaaatattatccagaccccttctgttttggcagggagtaccacgctgaatgaaggagatacgacaagcctgtctctttccgctacatcagaaattggcgcagtatgttccggcataagtttttatatttatgaaggttcaaaattaatcggcagcctaaacgggacaaagagcggcagctccaatacatatacggcaacctataatttgacaactgccgatttgacagctggaaatcatatttacacggttaaagccaccgatggctttgcaaccaaagaagtcgattcggcagaaattacggtttcggcttcgggcgttgccgttccgaccaacctgaaagtagtggcggcgccggacggcaatattgtaaagggtgaaggaacgattagcgctccttttgagtattacgacggcaaaaccgcgtctgtaaccgcttcggcgacggcgcccgagggcgcgacgcttgaatacgcgtttatagacagcagcactacgaaacccacggacagcgatttttcatccaacacggtcaatacgtttaataatgatacattcgcggctatgaggaagcgctttgtttatgtacgcgccgatataggcggggagaaatccgatccggtaatggccagctacaacacgcgcaacctggtaccggcggcggaggttacctcgtccttcccggacggcgttgcccagaattctgattttaacctgactgtcgctttaaacggcgtatacccctataccgggtacggcgacgcggccataacggttaaaaacggagatacggttctcggcaccacaacagtagggcaggcggagcttgcggaggacggtacggcaagcgcagtggtcgcctgcggcggccttgcggcgctcggcggcaacaccctgacaataaccgcacagtatgaaaatgtcagctcggccggcacctcttttacaatcaacgtattcgacccgagcgcggtgactgaaacaatcggccagtcggcggaaagcacgctgcttctggtcgatatgtcgaaggtatcgggtatgttcaacagcgccgtgccttacctgcatgtatgggacgacagcggacatattctgacaagcaactcagatcccagaacggcgatgacgctcgtgcccggaactgccaacctttattattttaagccgacgacggcgcaggaaaccgcgattggcaccaacgcgctccatgtgcagcttttgaaaacaaacacatggtcagcagcgggaccgcgttttgacataacggcaaaaacgcagacgcttatcaattcccttacttcgagctccgtcaccccggtaaacgtaacgccgcttacgctggaatccatcgcctattcgaccggaatgaagcagaatacgcaatatgcctttacggtcaaggctgacggcggcgtaccgtgggtcatgtcaaaatataaggctgccgacgcaagctacaagctgactgttacggcgaccccgcaggacggtgccgcacagacaatcgtaaacgcgcagagctttgcctataccgcggacagcgccgcatgcacatttaactggacacctgcgcaggcaggcacatatacgctcacctacacgcttacagatgaagctggtatagacaccgtcagctatcaaaagcaggtggaggtcaccggcatagaggcgcccgtcgttacaggaattacaccggctgacggttccgcgttcagcgtaggcgaatcgtttgacgtgacggttacggccggtacggcgcccgccggtattacatattattacgagttctccggcgctggtgtgaaaacagaagaccagacagccggaacaggcagcgccattacggtggaagcgactgccgatatggttgacaaggacaactcgattaccgtgaaaacatgggcacaggatgcggatggcaatacctccgcgattgtggaaaatacggttcattttacagtagactatacgcaggtgcaaaaggattataacgcgctgaacaagctggtcgcagacaatccgctgacgcccgcgatggagcagtactgtgttaaagctacatgggacgcctatcaggagcagcttacacaggctcagccgctgattgaaggcggattccccgcctatacggtaacggagaatgcatatgcggcgctgcttgcttccatgcagtccacctatacggagcttttgaataccgcggattatccgacggtcgatttttacgccggctcccagtggtatcatgttaataatactgccgcgtgggacaggacggatgtgcaggtgacacagcttcccgctgattatgtcggcccgctccttgcacaatcgacgccgtttgaaggcgccgcgctcgacttaggcaagaagaccgcgctgtccgatggacgacagatgtatatgtacaaaattacaggcgtaccggcgggcgcgaagtttatcctgtccgatacgcaggaattcaccttcccagcggaggctgacgcccccacggcggagtatggcaaaacctattatatttatcatgacggtacggacaacgcgctcgtgacaatcgacgcgatgtctgtcgcatcggttgatgccgacccgcttgaaatccagcagggcgaactggttgcgcttactgcagccgacacagtgctgggtaacgatatggtaacgtctgtcggcgcggcggtgacacatactttctcgctggaggacgggacagcacttgtactgaatgaaggcaagtgggacacggcagatgttacgcccggcagctataaaatttatgtgacacagtccgatgcaaacggcatgaccatcaagtccgataaattcgtgacggttacggttgccccgcgcaccgtttatacgccgccagccacggtcacgatttcagctgacatggaaacctattatgacggggacagcatcgttgtcacctcggcggcatccggctctacctaccgtctcgaaaccgaagcggagacagacgcaaaagactacgatacgctcgaaggcgcgacctatacctacgagctttacaatggcgctgagaaaataggcgaaacgacgggcctcgcaggcgcaaacgttacatttacaatccccggtgtttctgacgcggcgcagtacaatctgactgttaaggcgtacccggccctttccaaaggcagcgcgtccaaaacgagcggcgagattgtaaaaacagtacagccgctggttgcctggaatacagcggcacaggcgtttgaagtgcagaaggattctgccgccgtaacagaatactttgccaataacggagcctacacacttgtttcgagcggagtgacggcgactgcgcacggtacggacgctgctgtttcttaccgctacagtattataaataaagcggattcttcaagcgtaacgcccgacggcggcagctggacgccggttgccggcagctacacggttacgccggttgcggtaattacttatggcggacaggaatatacgcaggagcttaccgcctcagatattaccgttaaagcaaaccttctttccgaccccgcgcttacgggttccatcgacggcgcgccggttgatacctcgaaggacggagcgttcgacctgaaaaattatccggaagacgatacggcaaagggtaacctcacgtttaacgccctcgcagcggttacggagcctgcggacgcatctgccgctgtttcctacagctatacgctgaaagaagacgacgcacagcctgccgcgcttgccggcacagacggcagcgttaccttcaatctccgcgacaagtgcaaaatgggaagcacatatgtgcttactgccagcgcgcaggttactacctcaggcattacacagacaaccacaacagcttataccttctcggtgacggattccggccagcttgtcacagtatttttcggcggaccgacctcgtggcttgataaaatccaatacatcgtatacaacgatgcggataaaacaaaaataacgggtacgcttcttggtaccttccatacaaacgaccagacagccgggctgactgacgttacttacgatatttacacagcacagattcccagcggacaggaattctatattgccaatcaggtcgtttttgactcgtctaatctttccaacagcaccaccggcctgtatacggcgaaagaaggcgcgctgtattacatctacggcaagaacagcgtcaactacgcctatgaggtaaacgagacgacaatcgaagactttaaaatatcttcggtcaacggtacggcggtaacagagacagacactgtttacacagagctggggagtacggtaacgtttaaaaacatcctttcaagccagtatgcgtcttataaaacgcctgtaaaggttgagtactatatcaatggacataagattgcagcctctgccgacgcatcgtctgaaaccgttacaaccgacgttaccctggcaaatacgccgtctgaccccgaaagctttgtgttcgaggcaggaaaaacctatcaggtcaaggcggtcgtaactgagggcaactatagcatcacctacggcaatgtggtgaatataacagtccttgggccagaagaaccggttacctcttacttcctcctttccaaggaaatgcttaatgaccaggcaaacccatggacagccgaagggctaagatgggaagctgtcaacattgccggcgaggttgaagcaatggagatgggcaatacgccggtcgagatacagcctgacacagtcgtcaatggtattcagtatgatatcgacggatatctttttaaggtcacctaccacagcaatatatcaaaaatcaggttctttatggatggacagggtacaggcaatgaaacggacggctacagtaagctatcgacgagctatcttgacgttattggcggcaaatatgcggaaaaggtctattatataacggattatgctaattatatagcttcaccgagtattgcgcccggtgtcgaagggtggtataatctcaaatatacggctactttccaatatccgaaagagactgtgagattctatcagcagggtgcttctcttacagaggaagagctcagtgccgataattctgtgactaagacaatggagctttatgtatcggcaaacatagaaaagctctacccaagggtagacagccgttataacgagtatgtttggcagccgtcggcttcatccaagctgcttgaaaataccggtaccattattcctacaagcgtcaatacaagaaagtattcccttacgcttgttaataccccggaagaagcggcggggattgaggtatctgccggtacgatgaacagcgcgcctgaaatcagaagtatcagcggcagcccgattgaaggaagcgaaaacgtaccgtattatatctaccaggaagccaacaagctgtctacgcaggtagaatatatgtatggcgttcatattgttgcgccgctgctttctaaagataaggacggcaacgactgtgactttattggctggtacgatattgataaacagcagtatatttcttatcagccgcgttttgcgacaattataacgaatacccataagctgatgcccgtttacagcgacaatacggcgcttaacgtgctccagcctgaagcggttatcgacgacgtaacgtatgaaacctatatccaaaattcaaccgatatggtaaagatggtgtttgcaacgcgtgttatcacgcctccggttgaggattatacgaacctcaagctgtttgtgcagagagttgtcaaggcggacggcacggtcccacaggattccgaatggtccgcgccggttgagctgaccagccagatgaacaaggataagcgcgtgaatgtcgccatgaaggcggaaatttacagtggcggcgcgctcaacaccaaccgctactttatgcgcgcgtatgtggaatataacgataaagacggcaatctgcaaaaagcatacagcaatattgtagttgcatcaccggaattaatggcatctgtttaaaatgtgaacataattccaaaggaaaggacacggtgtgtatatgaaaaaaatatatgttgaacccgatcttgaaaaggtttatttcacatttgagcggattatgacaggctctatagatggaaccgaattgcttgggccgaccgacccctcgatgggtttcagccagccaggctcaattcccgaggttgacccttggggctgattacagatatatcaggagcggatgggatgatagtatcccgtccgctttttactggcgccttagatgccaggataagccgcgcgggggagtgaggcagggttgaagaggattcgtgaaaagcatataaaaacctggaagccgcttgacgcggtaattatctgttttgtgcttgccgcggcggcctgtttttttataatggcaggaagcgcagcgcacggcgggctgacagcggtcgtccggctaagcggcgcggttgtaaagacaattgatttgtccgcgcttgattctcccgttacctatacggtaaaaggggatgggaacctgtctgttacgattctggcggagcccagcggcgtccgcgtatcgcaatccggctgtaaagaccagatatgcgtaaagaccggaaaactaacatatagcggccagacggccgtatgcctgcccgctaaggtgactgtagagcttacatcaggtagccaggcggcggaacctgatgggattgacgcggtaacggggtgaaattatggaaaatagaaaagaaatatcgcctcgtattttatggatggcgcaaaccggccttgtaagcgccgctgcggttgtgctgtcggcatttgaaggaatgcttcccgatttaccggtaccggtgcccggagccaagctcggcctttccaatattgccgtcatgtttgcggccgactgcctgggccttccatcggcgcttgtaacggcatgctttaaagcggtattcgcgggactcacgcggggcggaaccgcttttttgatgagccttgccggcggggtgctcagcacgctcgcaatgtatatattccttgcgtcgaaaagcagccgctttgggtatattgggattgcggtctgcggcgccgccgtgcataatacggcgcagctttgtgtcgccgcgctgctgacagacgcttctatttttgcatatcttcccgttctcctgatagcggccgtacttgccggatgcctgactggccttgcgatgggcctgcttgtcccgccagttaaaaagcttaggctgtctggccacatatcaggataataagggctttttatttaccagcacaggattgacaggggtgtttcacgctgttatactgttacctatacgaacagggggagtaatcatgatggagtttgcagaaggacccatgaactgaatattcggaatgccggccttgcgctttttattgaggctgccctctggaaacatgaagcaactgccatgattagacttcgtttttgctcgtatgtattttaaaaatacgaaccgaaagtagtatttaaggagcatgacgcgggagcgccatgctttttttatgttaaaaatgacggcaaagagcggaaaacagcgctggcttgccgttttaagaagcaagtaataccgcggagagactatggaactctataaattataccatccggttacagcggcgccctttcaggctgacgcctcttacagggaagtattacccaccggagccctgcgcccctatatcaggtgcttctggggaacagatgattacaaaatgtattcaggccggaatgcaggcaatacgaggcttattattccagatacctgcatggatattatctttacgataaacgctacctgcaacacaatcagcggcagtttttatggaattgacgattccccataccagacggatagccggaaaaacgggaaggaaggggcctcgatttttggaatccggttttatgcgtggagcgcggccctgtttgcggaggaaagcatgaaaaatgtctgcaatctttcctttgatgcgggacagtatttttcaaaaataaaaaaggagctgacgcctttattatgggagaataaaagcctgatacagcgtgcttccgccgcggagcgtgttttgatgaggcattttcattccgaccgggaaaacgccaacctgttgaacgcggtatatttgatactcaggaacaggggctgcttcaaagcgcttgatattgcgggcgggctgcatataagcctccggcagctggaacgaatctgcaaagaaaatacaggcgtttccccaaaaaagctgtcctccctggtccgttaccagtatttatggagcgatatcctttaccgtccgtaccgcgctttggatgcggtagagcgctacgggtataccgaccaggcgcatctgatacgggattttaaacggtaccattccatgacccccaaagcggcaagggaaaaagcgttttccaatttttctgaaaacccgtaaaatgggagaagatgtcgtaattttactatacatagtgtgctgtgtttttgtagaataaagaaaaaacggaggcgttactatgtcatcttcaaaggaatttaaaaaccatgtgctggaacaattgggcggcgcgcagattacggcaaggagcatgatgggcgggtattgtatctatgccgagggcaagcttgtcggcggaatctatgaagaccgttttatgctcaaacaaacggaggctttgaaaacgtttgtacgggactataagctcgaatacccgtacaaaggctcaaagcagctgatgattttaatcgaaaatattgacaataccccatttatgcgggagctggcaaaccatatatgcgggtgtgtgaaaaacacgatgagtatatgcggaaccgactgctcggcctgcggtttttataaatcggcgtgccagggctgtaaccagtgtgagggaagcgttttttacatggaaggcggacaatgtccgatttaccactgctgcgcggaagaaaacagccgtcaaagctgcgcttcatgcgagaaggttccctgtgacatatggatgcggcagagggacccctcctattcggatgaagagttccaaaagaatatcgagggcaggctgtccaatttaagaaaaggataagcaggattttacactggttccacatctaaaattcatcgcgtttatttatatattttgcataaaaacaaaagagggtattttcataattataaataaatgatataataaatcctatgaaatgagcgtggaaactgatgatatatgcggaacatttaaagaaagaatttaaaaaaaccatcaaacagccgggactgctcggaagcgtaaaatcgttgttccatccgcagacggagcttgtcaaggcggttgacgatatcagcttttcagtaggagaaggggaaatccttgggtttattggcccaaacggagctggaaaatcaaccgtaatcaagatgctgacggggattttgacgcctacgcagggtacctgccgtatcaacgggcagattccgcagaaaaacaggaaagcatacgtcaagggcattggcgttgtatttggccagcgcacccagctttggtgggatttgccgctgtgcgaaacctacagtgtgctcaaggaaatttatgaggtgcccgaacagagctttaaaaagcggatggattttttaaacgaggtgcttgagcttgacgaattcataaacagcccggtgcgaacactttcacttggccagcgtatgcgcgcggatatagcggcgtccctgctccacagcccgaaggtgctttttcttgacgagccaaccatcggcttggatgtcgtggtcaaggacaacattagaaaagcgattgcaaaaattaatgcggaggaccgcacaacagtcatcctgacgacgcacgacctgagcgatatcgaattgctgtgtaagcgcattgttatgattgataaagggaaaaacgtgttcgacggcagcattcaggagctgaaagcgagctacgggcagatgcgtgagctctgcttcgaggtaacgcagccatctgagctcgaagcccttcattatgaggaagcgttttctggaatggaagaggatattgagctgataagcgacgggctttctgtccgtatacgcttcgacagcgacaagattccggtcagcgacatgctccagcacacgctttcaaaaatccatgtaaaggacgtaagcgtcaaggatgcggacatcgaggaaatcatccgccggatttataagcgggaggtaaacatcgatgcataggttcttacatacatataaaccgtttgtgcgcgctggcattttgagcttcctcacctaccgcttcaacttcctctgctatgtaattggggaaatcctttattgctttatcatgttttttgtgtggcgggcggtctttgcgtcttcaggcgaaagtacatttatgggctttaccatgacagacatggtggtgttcctttttattacgttcctgacgcagttccttacctccagtgacggcgcgtttgcgcttggtgaagagatacgcgacggaagcgttgccatgcgtatgattaagcccgtaagctttgatatggcgttcctgtttcaggagctcggcaataaaattatcatgatatgcttgtttatgctgccgattatcatcggtgtggaaatttaccgttttacggcggtggggcaggtgatgttccagcctgtgaatttcctgcttttccttttgagcgtgacgattgcctacttggtatcgttctacttcaacgtttgctatgggttcctggcgtttttcttaaagaacctgtggggctcgaacattttaaaggaaagcattgtcaatttcctttcgggagcggtcatcccaattgcgtttatgccgcccgttatgcagggaatattgcagctgctgccgtttgcttctttaagctatacgcccgttatgatatatatgggccgctatggtcccgtccagatttgctttttcatcggaatccagctgttctggctgtttgcgatgtggggaatttcaaagctaatctggcgcgcggctgtcaggcgcctgtgcgtacagggaggttaagctatggataaattaaacaccctgcgccgcatggcgaaaatgcaccgtatttttattgcgcaggattttaagcgcatgatggaatataaaatcgattttttgacgggcgcggtaagctttttgattaaccaagccatcaatattgcttttttatggattatcttcagccagattccagcgcttgccggatggagctttgaacagattgtatttatttatggtttttctttgataccaaaggcgctcgaccacctgtttttcgacaacctatgggacatcgcatattttactgtgcgcaaaggcgatttcgataaatatctcacgcgcccaatcaacccgctgttccatgtcctggtcgaaaaattccagccggacgcgttcggcgagctgctcgtcggcatcctgctgctctgctctgtcatcggaggcctgaacatcgaatggagctttttaaacgtcttgctgtttatcttagtcataccgtttgcgacgtttatttatacgggtatcaaaaccgtgaccgcggcaattgccctttggattaagcgcagcggcaatgtaatgcatatgtgctatatgtgcaatgatttcgcaaaatatccgaccacgatttacaacgaggtcatccgcggtgttgttacgtttatcctgccgtttgctttcaccggctattacccagccagctttttcctgacaggccaaaacccgctgttttccattggaggaacggtgctggtttctatcgtattatttactgttgccgtgcttgtttggaacagggggctgcttgcctacgaaagcgcgggcagctaaacgaagggaagcttgaaataccggctgaaaagagatggtttttgtttatgcaaatcattggcgaaaacattattttaatcataagcgcgctgctttcccttatcatgctgctgctgttccggcgtgtcaaaaggagcagcttaaagccgcctggcatggccggaagcatcaaaacggcaatcaatctgccgtttcgggaatttaaagcccaggtgcgcggccatttcggcgtgcctaaggtattccttttcattctggtgcttttgtttgcggccgtatcgttcctgtttttactgtaccgctttaacctggcggctgccatcatcctctgtattccaagcgccgtttgtatttcttttctgttcagtgaaattatttggcttttggcttacggggtaagaaagctgattgtgcttgaaaacgcatggatgaataccattttttccatcgttatcgtgattttaattatggtgtttgtcaatattttgttttttgctgaaatgaaatcgacggagacgttcctgcttgccgtctataatcttgtattctgctacatggcgacggttgcgtcgcttctgctcctgctgcgggaagcggggaataagcagcgcagcctgactttccgcaacctttggaaatccacatttttgattatcgcgctgtttcttataattttatcggcgctgtcctatgttggggcgctgcattatgcgcgcgcttttgacgcggccgggccgcttacctattttgacctgttctattatacctgtgtgacgttcgcgacagtggggttcggcgatatcgtcccggtaaacctatatgccaaggcggtctgtgtgcttacgattgccacaagtatcatatgtatcacgattctgcttggcacggtgctatccgtacgggcgggaaaccaggagaaggattgacgtaagggtgtggtggtgaaatggttttgaacccatttatcagtgtggacgaaacaagcggcgcgcagtatctgacggagagctgctcgctcaacagggtggtgctcagcaagctgccggttgagggaatcgaggacgggcttgcagggcttacggcggataaaatattcagtacgccttctttaattgaggagattataaaaaacgcggacgcgcttggtatcgacgtggaaagcgcccagcgcatgaagctgccgttccttttggaggaccgcttggtttccggaaacgcagaaaacgcggcggtggccagggagattgtaaaaaagttcggttaccggctgggcatgatattcctggcgcttaaaaaaggagagccggaaaaccgggcggcacgcccagactggacagacgcgcactgggcgtactgggcgcaaataaaaacggtaatcctcgtcggtgggcttacaaacggcctgctcggcgtgcgctttaaggaatatgcgctggagctgttccaggcggcgggtgtggaaccgtacgattttgttttatttgagaacgcttcgtttgtcggtatcatgggctgcgcgtcaaaaatcagcaggccggaggggctaagcgtagtattcgacctcggccaaacaagcgtcaagcgttgcatcgtccggaaatccggcggagagcttgcgggaattacaacgcttccttctcttgagtcgaagtatatgaaatcttcgtttgagaagcctgaagaaaagctggaaacggcggttgccctccacaagtacctgatgaacctcatcctcagcacctaccgcgaggcggaaaaagacggtgagctgagcgatgaaattattgtcagcatagcaagctatacggttggcggacggctcaacgataagcgcggcggctacgcaaagcttacgcttttgtgccgcaattatgccgactgcctgtcggaggagctttccggccgcctcaagcgcagggtaaaggtcacgcttgttcatgacggcacagcggtagcactctatttcagcggctacaaggatgctgtctgcattaccatgggaaccgggttcggcgtgggctttcctgacatttcaatttaaattttacacggcgcccctggtttttggggcgctttttcttttgcttaaccagtgcggacggatattttgtagaaagtgcaaagaaatcgcatcgtaactttggattgtatgtaagaaggaaatattatataataaagtagataaaaacattgcgaaaaaatcccagaatcttagcggattcagaaaatcaaggagtggttccaatggctaaccggtattacgaagaaaagattgaatgcgcaccaagggaggttctccgcgagctgcagtctaaacggcttgtagagatggtggagcgctgctacagcaatgtccccctttataaaaaacggtttgatgaaatcggcctgctgccgggtgatattaaatcgattgacgatgtaaaaaagctgccctttacatacaaggacgatttgcgggacaattacccgttcggcatgattgctgtcccgcatgacgatttaatcagaattcacgcttcttccggaacgacgggtaaacagacggtcgtcggctatacgagaaacgacatcgacgtttgggcgcagggctgcgccagggcgattgtcgccgccggcggaagcaagtccgactttgtccacgtttcctatggctacggattgttcaccggcggcatgggattgcattacggcgcggaaaagcttggggcgaccgcgattcctgtgtcctccggcaatacgaagcggcaggttaccatattgcaggattacggctccgacattctctgctgtacgccgtcctatgcgatgtacatcggcgaaaccgcgcgcgacatgggcatagacacgaaaaagctgaagctgcgcgccggcattttcggcgcggaatcctggacggataatatgcgcagggaaatcgagcagattctcgacatcaaagcttatgatatctatggcctttccgaaattgcgggtcccggcgtttcctatgaatgctgcgagcaaacgggcatgcacgtctgcgaggatttcttctatccggaaatcatcaatccggacactggcgagcagcttcccgacggggaatacggcgaactggtttttacctgcatcggaaaggaggcgctcccgctcgtccgttaccgtacgcgcgacgtctgcaagctgtcgcatgaaaaatgctcctgcggaagaacgcttgtcaaaatgtcgaaaacacgcggaagaaccgacgacatgcttatcatccgcggcatcaatgtattcccgtcccaggtggagcatgtgctgctcgacctcaagatgccgccgaactacttaatcgtcgtcgaccggaaaaacaacctcgataccatggaggtccaggtggaaatgacgcaggagagtttttccgatacggtgaaggatttggaggggattgagcgcaggattgcatcggcgctcgattctacgctcaacatcagcgcaaaggtgcggctcgtcgagcctaaaagccttccgcgctctgaagggaaggccgtccgggtaatcgacaagaggaacaagtgattttatacatatagtataaacactcgagaatatactaatagagcgaaaggaatgattttatgaaaatacaacagctatccatttttgtggagaacaaatccggcaggctggcggaaattaccgaggcactcgcgcagtctgatatcgatatccgcgccatgtccgtcgccgatacaagcgactttggaatcctgcgtttaatcgttgataagccggaggaggcggtggtcgcgttccgcgaggcgggcatgaccgtttcgctcacaagcgttatcgccatcggcgtgcacgacaagccaggcgagtttgccaaagcggtgcgcctgcttgctgacaacgacattgacgtggagtatatctatgcgtttatcagcagggaaaagggcaaggcgtttgttatcctgcgcgtaaacgacgaggacagggcaatcgacctgctcagcaagagcggctttactctgctcacggcagaagaaatacatggcatgtagtaaaaaacaccccggcggaattaccgccggggtgttttatatgtatttgctttatttttcagtttgtaaaaaacggttcattagggtatggcctttttcaataaacacacctgtttttgcggcattttcctcatcaaacagcacaacgccgctttccctttcctggctgcttcggtaaagcaggtaggggacggggtcgcttatgtgtgtccgtatggacagcggggtgggatggtccggcagtacaaggaggctgtagtcgcccagcttcttcatttcttccacgagcggcgcgagtatatgcctgtcaatcagctcgattgatttgaccttgttttcgacttccccgcggtgtccgcattcatcgggcgcttctatgtggatataaacgaaatcctgcccggctttcagctcctgtacggcggcttcgagctttccatcaaagttggtatcgatataccctgtggcgccgggaacgtcgcaggtgcgcattttggcgcagatgccgatacccttgagcaaatccacagccgagacgaccgagcccctgagtccaaacttgtcttcaaagctgtcgagcttgggcttctgcccctcgccccatagccatatagagttggcgggacgtttgccgttttgaatccgctttacgttgaccggatggttacgcagcagttcgtggcttttaaccattagcgtgaagagcttctgcgcgttttcgccctgcggggtgtactctttgatttttttgccggatatgtcatgcgggggagtgagtacgcctggatgtgggtcgcccttggcccagacaaggcagtggcggtagcttacaccgctgtaaaatttgaattcgttgttcccgagcatcagctgtaagtaatggacgagctgggcggcctcttcggtagaaatatcatccgcgcagtagtccaccatggttttctcttcatatttttcttcgtcggagagcgttacgagattacagcgcagcgttacatcgtcgtccttcaggctgattccgatgctcgcggcttcaagcggtgagcggcccgtataataaaccgcggggtcgtatcccataacggaaaggtttgcgacgtcgctccccggctttaagccgtcggcgaccgtcttgacaaggccaacctccgatttttccgcaagctcgttcatgcatggcttttccgcggcagccatcggcgttttgccctgaagcgcttccacgggataatccgccatgccgtcacaaagtactacggcgtatttcatatatatcaccttacctttataaattagatgatgcagcattttaaaaaatgtttttgctggcggggacaaagccatcgcaagcaaaaccagcaccgcttttccgtggctaaataaaaatatttgattgccgtgtataaaaagcatgcatttattatatacttcttttatgggcgaatcaataccggatgcgggcagaaaaatgtaaaaaattcggcaaaaggtattgacattttttttgaaaacgatataatagttattgctgtttagtgatgcggaattgtgtaatggtagcacggcagactctgactctgtttgtctgggttcaaatcctagttccgcagccaataaaataagctccgataaaacctgtcggagcttatttttcaaatgttacatagcacgggatgtagcgcagtttggtagcgcgcttcgttcgggacgaagaggccgcaggttcaaatcctgtcatcccgaccacaaagaccgcttatttagcggtctttttctttttgtgttgcatttcgtgttgcataaggccttcaaagtggtcaaatacaaccttgtttgtttcctgcgttttatcgcttagagtatgcctatacacctgtttgagcggcgcgtctgacgaccatccgctgcgctccataatgtattggtcgggtataccgagcgcgtgcaggattgatgtgtggtagtggcgcagggagtggaatttaaaatgcggaatgccgtttttggctagcagccgcttgaatccatttgtaatgtggttgggattgaagtttggtgcccagccttttatctctttgaatatcgcttcgggaaacttaacgagcctgtccccggcgtagctcttcggcggtttaattacccaatcgccgttatcatcctgcaccattgcgttacatacgtgtatcggattatcctccgtgtccgttttgtccagcccacatatttcgctgcggcgaagagaaccaaacgccgcgagcaggataggcacgtataaatctgtttcgcgtgccgcctccattattacctttatatcgccgtctgtgggcacgtaaattttaggcttagtcttttgtggcaaagtggttttcagccgaaattcgggcaaatacgcgtcaagcgtagcagatagaaggccgtgcatgttgcgtactgatttcggggagtgcgtttttgcctcccggttgatttccttctggatcatctcttgcgtgagcttgctcagcgggatgttcattacattctgcaaatcgcgcgccctggaacgtttgtattcgcggaccgtggagggagacaataccgtatctttactttctatgtacttgtccattgcttcgccgaccgtcatattggccgcttcgcgctgcgtctttagggagtaagcagcggcttgatattcaacgtccttttttgacggccctgtgaaagacttgtatttacgttttccgtccgcgtctttaccgatataaagcaatacgcgataattaccagacggcaacttttttgcagtagccatattgtcctaacctcctaaaaatgggcgcaacaatgccctgttgatttaacagggcaataatggtacaatatggttgcgatacatatcgcaccgtatggccctgctatacggtagccgctctttcctgcgccaacaggggagggcggtttttttatttactcaatcgttatgtattgtgcttcaagatatggaatagtcatgtcgttacccattactgtttcatacgtttttgttccttttatggtgccgtacatgtttataatatcatcttccaaaattctgctttctgaatcgctttttcgggtatattcaacgtaaacagtatcgctccagataccttcatcaatatactcaaaagcttcataggtgacattaacacggagaacgacaaaatcaccgctttcctgaacttggactacttcgcctctaaacttagcgggcttgccctcgtagtttttggggttgcgggcgatatccttataggaatattctttgcagctattaatgaagtcttgctttgcttctttttcttttttcgcttgttcctcggctgcttttttttcagcttctttgcgtttgttcatttctgagttatagctgttttttgcatcttttccgctgactatcaatactgcgtcctttatataaaggttcccaagcatcttatcatccacacgtccggccacagtcacgtattcttctttttttaagtcgtcagtgctggcaagttcaacggaaacagaatttatgccggaaataccttcggtaaataataacctattatcatttatcgaactgatttttccgctaaactgtacatacttatcagtatatttatcgctgttttcatatacagttaaataatctattttcgttacatctttgggtagagtaggtgcttcggttgtttcaccggaaccattgccggatacattgtcagatacgtttgacgaagctcgagtttggaaagcgctactactatctttgtttttaccgccattaacaatgccactgattatgcctataagaaccaaagcgcctaaaacaatcagcacaatttgccacggttttagctttttcttttgcggaacgggagcttgtaagttcgacatattgccgaaagattcaagaacctcgttgtgatattctgcccctgctggaaatccacattcaggacaaaaattcccgctttcatagtcgcaaccgcatttgttacatttcataatttcattcctccgatatttatatacttgcagaatttgacatttctctacaaagcatatataattatttcgtcgaaggagtgacatgccttcacaatacctttattcaggccgttgcgagtgccagctcgcagcggtcatttttttataactctcgcctgctcacggaaacaattgttatcccctgcctatccaaatagctctccactgcaattagccgtgaaacatcttttgatataactgttttgcgaatgacaagtagaaaatcaaatcttttttttggagctatggcttgcaaattaattaaacctggcagagcatttatatcgactgtacgtaaatcataatcagcttgtaccccaattacctccaggttgtgcttatcggcgtatctttgtgccttttttatttgcctacgaatcccaaatgaagttatagctttagcgtagatgatagctttatccaaagtggcaccctcccactcttaaaatacatagaaatcaaagaatttttccttgaattcatcgtatcgtcgtcgggagattggatgttgggaaccgtcattcatttcgactgtgttttcgggccaatgtggacagtatatttgctccatattaataatggtacttcggtttatcctaaatactcgcttgaaagagttctcaatttgtgacattgttagatttgaacggctgactgtgccgtcaataaaatgaatatctgcaaatgtatggctggttgtaaaatataccgcttttgttaaatccagagtgcgggcagggccgcgctcttcatatttcactgtaatgtgggtgtcctcaagctcttttacgagctttttgattacttcgtcgtaccgttttttgtttttggcttttacaataaaatcaaaaacttcgtgtcggaacgaatcagcagctaaatgtgcgtggcttgttacatatataatcttacagtcttttttagtctttaccaaatggtcagcaatgtgaaaaccgctaaatactggcatatctatatcaaggaaagccgcatcgaacggattgtcccgatgctcagagagtaatttactagcgtcatcaaaagacttaaatgtgtaactccctatattgacaaattttgcaaatgactttttaacaaacatctcaatcatgagtaaatgcagtcgttcgtcatcacatatagcaattcgcattttcacaccccattataattctatattagtattataacagggtggaactgttgtttaaatgacaaaaatatggcaaataatcgccggaataaattggtaaatccttcgtcattttgcatgaattttggccttttttaccactcgtcccggattttgaccgctcgtcccgccgaagtctttacaaaattttgtagattggtattatgtaatcaacacccaaacaaatccatttgaccggtcatcatggatttttttatatgtgcgattctgttgttattgcacattttaatacgcctattatataaaagcaataggagggatagtaattttttactgtgccataaaagggacaggaaatgtttagtggctaaaaatgcattgacttaatggaacgaatgttctatcattggtgacagacagaaggacaagatggaggtaattagagtgcaggaaaacaaaaataattacgatgatgaaacaatcgagatattaattttgctatccaaaattggtcaaaaagacaaagcgatgtttaaagaaaaactcagttcgctgattcgctatcagccaaagagcgaagaaatttaatcattcgagaacggtcgcccctatctagttgattcaataaatttaatatttgctcgtcatctttactgatggcgggcttttttttatgttcttcaccattaagtaaataatctatagacacattaaagtaatctgatagtttaataagaacgtttgaattcggttctctggtacccgtctcataattgttgtaggtcgtgtatggcatgcacaattctttcgccatctgtactttattaaaccctttttctgttctaagtttttttaatatatcacaaaacactttaagattcctccccttatttccaatacaaatttatcatgctgatattgacgtgtcaagaaaaatttactcaaaacgaaaaatttttttctaaaaagcattgacatttactcgaaatgagtatattattaaaacacagttactcaatacgagtaaaacggaggcgaaaaatatgaaaaataaataccaaaacattgaggcggaacgagtacgtaacggattaacacagcaagaaatctcaacttatttaaacataacacctcaaacatatagaaattatttgcaagggaaaagtccgtttccggcaaaaattctattgttgttgtccgaaaagtacgcttgttcaattgactatctcttagacgcaaaacatcagagcacgaatccggaaatgctcatttcaacatagaaaggagatgaaaacatgccaagagttaaagcattaggaacgcaacaaaaagcaaagcaggacgcagcaaaaaaactaaaagcgaatctcgcgtattatgcgaccttacacgggtttgataaccacgagctgacaacaataagcggaatcagtgtagcaacgttttaccatcgcttacaagaccctacagcgtttcggctcatagagcttatcagactagcacaggcctttaaaatccctgtgacccggctgctggacgagaacgataattctgtcgcgcagaaaggaggcgtgaacaatgtataagaatctcaaaaccgaaatgaaacggaaagggataaccgaaaaagaaattgccctgaaaataggaatggcaaaagagacgctttcgagaaaacttaacaggaaacaaaatttttggttggaagaagccaaagcgattcatcagaattactttcccgaatcagactttctttacttattccaaatcattcatagaaaggatgtggaaacacaatggaacgtaaacaaataacaatccgcctaccagttgaacttaaagaacagttgcaacaagaggcggacagaaaaggatataccgtcagagatttgatagttttcattcttcaagattatgttcattcatccactcttcaagaataaattcaatttgtttacctgccgaccttttgtttttcttagcttcatcacgaatcacattaagtaattcagtaggaattcgcagcgtaaaccttgaatcttcttccttggtatatgggtctttttttggcatgtaaattcctccttttgacatcatattgacattatatgaaaaaaaataaaaaatgtcaataagacacttgacgtcaaatagatgatgtgttatattataagcgaaaggagttgacgtcaaaaatatgaaaaaagacgatagaaaacggtttacactaaggctaccaacaccgctgttttcccagcttcaagaagaagcagaattggcaggtacgcctttgaatgcttttattcttaatgttctatgggattggtctgaatcaaaaaataaaggaagtgaaccacaatgagtaaaacaaaggccctagcgtccggctgctggtacgctatcaggtatcgcgtgctcccgttta

SEQ ID NO: 545 - DNA, 26986 bp, Scatavimonas FBI02887
  source 1..26986: mol_type = genomic DNA
ttataccgcattgcctgctcgctgtcgctaaaacctttcgtcgtcgggtcagtcaaaacaccgataaacgcaaggatttgaagcagcataaccacgatgtccaaaatctgtttctggtcgaactgcgggacgactcccgccatgttgagtagtgtgtaaataaaggtaagcacgagtgaaatcaatcccacccaaaatggtccgcttttaagccttaccttccaattaatgttcatgttctatcttcctttctaaatcttctatcctgtgattggcgactcggatttccttttccgctacagccatgcgctccaccacagaattatgcttttccacctttttttccaactgctgaatacggtagttcgttaggcggctggacgcaatcacacccagccccgaacctatcgccgtgccaacgattgacaacaacgcgataacaatttcggttgacactgctgcgcctcccttactaagcgccaagggcggtttttgctgcggtaatctgcttcgttattacctcacgcatcttgcggatggtcttttcgccgacgattccatctactgtgagttttgctttcttctggaattccttgaccgcttttacggaaccggagccgtaaccgctcttgtcatctaccgatgccgttatgtaacccagctgctttaaggtttttaattcggatttgacgagcaacgcgaaattgttgatatccccatttttgacttccatgtaattgtccctgctttcttccttgtagtttggcgcggcatatccgcgtatgccgctgtaggtaaggctgtagctgcgtgcggctaccatatcgttgtaattgccctcgattgtgtacacggtatttcctgatacacgttccacaatcccaacgtgcccccaggtaaaatggattaaatcgcccggcattggcttgtatgttttatccttccacatacctctcgcccgccactgcgtttcacctgtcgggcctgcgcttgcggtgaatacggtctgtgcggatgttaaccccgcgtgatacatacaccacgcgcagaacatcgcacaccagtcggcagcttcaaagccctggttcttgcagttcatatatgcggcgtaccattccccgaacttcgtccagccgtttgccaattcccggtatccaagttccttcttcgcggcctgcaccgctttttccctttgtgttgccatagcaaaaccatcctttcaatttgtgccgctgtacgcggctgtttttattgcttatctttattgatctgcgccataatcgcgcggtaataggtatcgccaatctgttggtactcgccggtgccgccgtgtacatggtctgttaagactttcattgccatatcgttacgcaggtttaccggctgttcgacaaacccgttgttgtactcgcagtcacgttcctgcaacaaatggattgtactccagttttcctttgttccagtaactgcctgtaacgctttgctgagttcccaggccgatgttttcaggcaaaaaccccaaaggttcattctcgtcttggggtaggaggataagctgacaaacataatccggcattccgggtagctctcctgtactttttccgcaagcgcccgcaaacgggaggcaacaccggaataatcagtaaacgtatcgttccagtttaaatgaatgatgcagtagtcgataccggaatagccatgcttttcgcagtaagctttgaaatcaatcgtcccatttacagcaaaggggctttttgaaacatcgagatagtcggaaaccttccaacccgcacgcccttcatggcacgcgtttgggttgcttgccatcttctgcgtcccaatcaggttcagatttgtgaccccgttttcctgcaatttggtgcagagcgtgttcacggtgcttttatcgtcgccgtattgtgtcaggctatcgccaatgatcaacaggttttttgagacagccggattcctcactggatatacccgcacagtcgtgcttgctgcggaaatctcccggtcaaaatcatcgtatactgtcaccttcagggtgtgcggcccgatatggctgtccagaggcgtccatttgagcttcctgtcgtatacttcccccagccaagcgttgttgtcccattgtaccttcaggcggtaatcggtaatgttcttcgcgccgaatatgctgtcccagaacagttccaacgggtcacccactacggcgggaatttccggcggcaggtagttcgccatccgctccggctttttacccgcttcaatctgggcgtttacaaaagatgtgatatcactttgataaggatactccacgcccagcgcgcattggacggtaatgtaatattccgcacccgcgttggccttcgtccatctccacgcgccgcttggcgggagatagagcgcatctttatatataccggtcaaaacgccggcgacgtttgccgtgtttgctatgttggaaagctggaattttgtcgcggaggaataggttggggaggtggttttctgaatcccataaatacagattaaatattctgttcctgcctcgcattgggaataatccagattgagttctacacatacgtttgtatgaagccctgccgataaagcaactttggttttgcggtttgcaagccgctctgtttcgtggacttgttttcccaagagatcggacggtttgcagagcatgaaggtaagctgtccgtcctccaccatcttaacagaggggagatagagatatttaaaattacgcccatcgtaaaggaacgggatgctatagccaatggatgtgatgcccaaaccgctgttgaactctgttttgatcgttttttcaagcttttccaggttgaatccaatgataccgctgtttgaaaaatcgtcggctatcgacttgacgtttccctgtccgattttcgcgtcggttactgctccgtccgctatcttagaactggtgacagcactttttttaatagcaatttcatccactgaattttttaaactttgcggctgaactattacattttcgtttaggattttaattgctccggcgttttttacatttgcaaagttgttttctgcgtactgttttccaataaatttatccagccgttcagataaagtgttttcatctccacgagccaaaataatttctgtatctgttgttacctgccctattgcttgatttaccgacgcatatagtttttctgtttttatgaccgcttcggctaaagcggtgagttcatccttactttctaacgcgccatcaatttcagctttgccgatgttcaatgttacaccaaccgctcgcaaatctccatttgcagatgtaatttgtaaaatacagtttgcctttccatatgctgcaaacacctgctgttttgggacgaatgaaataactccgcctttagcatctgccactttaccttccatatagacaatatgcccgtctgcctttgcaacataaaggcggacgctgcatcctgtcacatccaacatcttgtcagtaatcggtgcattggtggttttaagagtgtcccctgatttttcaataaggataaactcgtattcacgttcgttcccttctccttgtacagcgtttaaagtaattgaattcggttcgaataccttaatcttgtgagtttccttgtacagcgccatctgtatcaccttcttttgtcaacgcatcgattttatcaagcatcgtataaacacatgccatcgtcccgatatttgtaccagtcgcttgaatctgtaaactagctagccttgcgtaaatatcgtgcgttaaattttcgatttcttttaactgggccatcctgccaccttccttcctgccacgtaaaattcaatcgtgttatatccaatacggataaaattggttcgttcctgcgaactaccgctatatggataacgcacaccaatttctaaacgtgttcccgtagtccctccatcttgatacatgtggatgtaacaattattagtcgcatttgcggcagagttgaagtattttgctaaatacagctttgtgtcgtcgatacgcattactcgttccgttgttacatcggtatatcctgttaatcgggtaagtgatatttcgccttttccgctggaatcatttgtcattttaaactcgttgcaaagggtactgttcagggcgtttgagcgaatagaaacaccgttcacccccaacaagcccatatatttttcttcaaggttaaaaatgccaccctgcaaggaattgttctctttactgtatgcgtacattccactgtagtatggcgctccgctgtataccactttgtcaagtttgaaatagtatccgctgttagaaccgctcattttggtgcaggacaattcgtcattgtcaaggtcgaaatacgcatttgtgttctctgctccgcgtataacgcctgtttttatccagtctgctacgacaccatgagccgcgagaacatttaaaacagcatttccgtttttatcaaaacctgcgccccacgttttgccaccgtccgaagaaacagcaaacccatcaattccttttttccatatgtatttgctttcttctattgttggcttgtcgtgctgatagacaattttggttccgtcgtcctgcggtacagatgtttcataaaaacccatgctattagccatcaagccgttgaaattttgcgcatacacgtcgtaggcagaaattttcttttctgcttcctgcttcgctattgctttgatttttgcggtctggttcccaccgctgcggtttttttcttccgctgtctcagcgtcacatcgaaggtttgttttactgtccagcttataagtcagtcccgttaccggcgtgcggtatgcgttcccgtgcttatcatatacagtaacaatatctccagcctcaattgccgggtttgatatttccgcgctttcaaaaggagtaatgcgaaagccgagcaacctatccgcccaaacagaatcccacataggattgttagtagaatggctgttaatttgtgcgagcggatttccttcaatatggaggacataaccttcctcacctgtcatgaaattcaattcttcatctgcggcgtttacaaccgaaacgccagttaccgcaacgccgccagaaatcgttctagattcgtttatttccgtttctgtactttcataccatttgatatgcaaacgtccgtctgcgtcgcattttgcaaatgagcaagccaattgcgacacccaagaaacgacatcacgaaaagtcgcggaatcgtcgatgtgctgcctatttgataccttccaacttgcatttgggaaatcaagagaatcaactactaccccacagcgagtacacgcatcgtccaaaatagccgcaagcgtagccggatatttcaaattactttcgttgtaggggcggtctaactttgccagattatcaaacgctgttaccgtcacgtaattatcattattgacgatttcttccgttgtatagattccctttttcacccattcaatagttaggtttccctcgtagtcttgagcagtaataagcccgattctaacatcaaattcagcttcggcaaaatcaatttcattaaagcgaccgttaaaattttcaacttcaaattttaatttattgataattgcgccgccaatgccaaaagagccttgttctgttgtctcgtccgtaattgtaaggcttcccatcataatattgtcattggatattatcaaattgttgttcaactcgttgaatgaatatagacctgttttccgttgctcgtcgctcagttcaatattggtataaatttttgctacgaattgtcggcctgaagaggttataagctctttgtattggtttgaaacattttgcatagctctccccttactcttctataaagtcacaagttacatctgtaacaataaatttttggtgaacttcatcccataagttgtaatttgcgcttatgtcgcctgtgtagaatcgttttgttatattgcagccttccataatgtcaggaaatgtaactgaaacaataattccatcctctttgaaaaactgcgttaaattgtgcgcttcattccatgtcattgcactccacgcacacgaaagagttctttttcgtgctactacatccttttgcatgattccggtgcgcgtggaacgcccgctttcttcgcttgacaaatcagccagtttccaagtacatgaggccggagaatggatttctacattgtttactttcataaaagccattacatattcaccctgttataccttctgctgtcttcttttttgattttgtagacgcggcgggcaacctcgtccccgtcaatttggttaacaacggtaacgttcattgcaccgtcgccttgcgcttctttcacagccctgtacacgcctctggagatgccgtcaacaatctgctgattgtttgctactgcgcttctatttcccattgaaccaaccaattcaggccctgcttcacgcgcaataaacatttcgcctctattcggaaatccgccttccgcgtataccttcggaacagttacttttggaatcgtttgatatgatacggaaccatttgcctctactttgacattggaaacggaatccgcaaatcctgatacaacacggtttaacgagcctgtgaagttatcggaaaactgctgtagcttttgaagaacctgattaaaggtatcggtaaaaccaaacacaattgtgtttgaatctataccatcggctaacgtgcttgacatctgttttccgtacttgcttaaatcagcgttctttttcacgacactcaaactcttttcggtcatatcgacaaatgatttgactgcgtagggagtttcagatttcacaccgtttccaaggccctgagcagaccaaactcccgccttaaaagttcttttggatggtgaaccaaaatctccttctttataaagggcatcgtatgaaaatttaaaaatatcttttccagttttttcagcgtcgcccattttgctgtttgcaccgttgatataaccttccaatgcgttttgtccggcaaggaaatacccgttgttttctccgtaactgccgtttttaacggtttttaaaccgtcgagtaaaccaccgacgaccgctgttccggtattttttgcactcgcgccgagtgatttcgtctgattattaagttctgttgaaatcgggtcgaaaatatcagttttgaatttgctgattgtatcttcttgaaattttgctttaccgtttccgcctggacttacaaagtctgaccaaaacttatcccagccctcttttgaatcgtatttcttagacgcttcttcaaggactttttttgcgcttccagctagcccggtagaaattccagaaaagacagattcaatttcctttttcacttcactttcctgctggctgtagtatttctccaaggaatctcttgtgtcataaagagccggaagatattcctgcttatattcagaggcatacgctatagcattttcaagttctgtcattgtagtggtacgagcttctttgatagaatccaatgcctcttttccagtagaagcgatttctccaatttgctttttggcatcgcctacatcatcaccaaaatctatttcgccattgttgaatttagataatgtgtcctcccacttgaaagaagcctctgacataccaccttgaagggagcccaattccttgtaccagttgttgatattggacatgattttgttatagtcttcggaatttgttgcctttcctattaactcgtcatatccgccttctatctggtttttcagttctgccgccctaccctgtgtctcacggacaaatctctgatattcgccgataagtgtatcgatttgcgttgaaatttcaggcgttgcatctttcatcgcctgtacaagtgctgtattgataacttcctgagaataggacattttttctttgatggtgtcatacagcgtgctgaaatagcctttgatttcttcgatttcgtcataggttacagtaccgctttcaccaagcgttaatgtaagcccctgaatcttagtgacggattcattgattttttgatttgcctcggcgattttacttccccagttgataatttgcgtgttgttatcgatgatggactgtgtacttgctttaagcttgtcgttaaatacgcttaatgaaattccaacaccgtcaaacaccgtcgtctgtacaaactgagataccatttcatcgtaagcttcgcaagctccgtaaatagcagctcctatacctactacagcagccgccaccaagccccaaggccctaacattgcatacatagcaacgccaacagcagcacacgcgggaattatggtatagagcgcttcgttaagagaaatgttccctaacgcaaggttcttaacggcttcttttactgttacgaactcaatacccaaagctattaaggaacccgcgactttctgagtagttgacaaactatcccgaaatgctttcattccgcctttaaaagaggcaaaaagcccgttcccatctcttcggtattttgaaaaagcagaaaagaacgctttaaacgcgccggacactgttttgacaatacttaggttagaaaaccacttccacaagctttgaatataagaaacaaatttctttacctttccaaatgcccaaagcgcgaccatcaaaccaccgagcgtttttaaaagaggttcatattcctttaacgtgttgtataagtcgctgaaccagactttcattttcttatatattttctcggtctggttatccagctcgccaagaaaatcatagtcatacgctgataaatcaacaccgaggtcataagaaggaacatcaactttactgtctttactctttggttcagatagaatgttcagctggtcaaatcccataatgtttttctttactttttcagccgtatcattcacgtcgtttaaagcgtcgtttgcaccttcggccccgcttttcagtccgtccatattagagtaatcaattgtcgggatttcaaatccgaggaagtttgcccctacctgaataaattccgttagaagcttaatgaacgcctgaacatagggaattatttttataagaacgggtatgaacaggttgcctaacgcacgttgtaactgaacagtttgctggttgaggattctcatagcgttagccggagtaatcaaggtgcgtgccatatcacctaacacattgttgctctgttccataatagcaatatagcgtagctgcgatttctgcgcctgtgtcattttattgatgttctgttctatgccgtgctgatatgcaatttgctgtaatgtagccacgtccaaagcataaccgagccgacgcaacggctccagttctcccgcgataccactctgtactttttcaagcgactgcgcaatgtcaatgttgaagaatgaagaaatatcataagcaacttgtgtaagacccttactcatggtataggctttatcttccacaacgccaaagccagaagcaatttgcataaatacgccctggttcctaatccattcagacatatcaatgcccatcttatcctgaactttttccgcataatcaagagcctcctgcgcgtatttacccatcgaaacggtaaataggttaaggttttcgacgtattcatttgacttgacaacccatcctccagcaacatcatagagtttggacgccgccattgcgtagattccgagctttgctttaacagaggaaatacccgttccgaggaaactatacgattttgtggttctcgtgttagaaaccgtcaactttgcatttgcgttgatggcgcgctgcatgttcgcaggaagtttactaaacccggcagacaccttttccatctctgttgaaagaggcttaaccgccgctgtaacctgcttaatcttctgagaaaattccgtaagctttttactatcaagtgtctctgttatttctggaatcttttttagcgcgtttaggttggaattaaggtttgtcgctttcccaacatcttgcaaaggtgctataccggcagtcaattcacgaatagcattgaagttaataccatccagcgaacggacagctgaaccgattgcagttaattggtttgctgttgttttagatagctgcggttttccaagctgagaaagcctctgccagaccgaggcgaagcggtcaatgttacttactgattccccgcttaacttttttgtcgcgtttgcaacggaactcatattttcagctaatccattcagccctaattttcctaccgtagattgcagtttttttagcgttgcatctaaagcatctaagcctttgtatgcctgctgcgcttctgaatcaacctgtagcatgagcctgtcaaccgtaacatcagacaaaaaagaacgcctcctttccggcaggcgctcttagacgctcttgaatttggaattgatagaactgattttcgctttaaagcttgctatcttagcttcgttttcacgccgctgtttttcttcaacttcttttttcgttcttggcaaaggttcttctggataaatgcatggtttttgaccgcttttaagaaacatattgcagacagaagcgtttaaagcttgcaggaaatacaatccctgtaaccacattttttcattttcatacttattccttaaaaaataagcttctcgataatcctttaccagcgtcgcgtccatattccaatattggtcatatgtcattccaatagaaagatagaacggaaattgagtgtgaaaaaactctgaatatgaaatcggggaggctggactgtttaccagctcgcctcccactgaacgtttcccccggattcgtcttctgaaccctcgaccattgcggtaataggctcgttatacatctcggaaagtttgtttatcaactcgcccttgttcgtaattgcgtcgaaaatagcattgacaatttcctttttgatatagggatgatgtgcctgaaacgcaccttcaaagagttccggcaacattgtcacaggccttttcataacctctgaaacatcaaaccctctgcgttccatacgctcgattgattttcttgtaaattcaagcgtataatccttgccttcataggttaactgaatgatttttcccattgtttttcctccttatgtttcgtccattacaatcggcgtagacggcgcaatcgaaatagccattccaactacttcatttactcccactccggttacacggggagaatgtgttccgctaaaattgaattttccatttgcaccagtaggagtaactgtaccgtccgctcctgccgttccaccgaaccacactgaatagtcctgttttattccggcagaatccttcagctttttataatcttcgggcgtatagttcgcagtaaactctaacgcttctgctgactgaattccctgtacataggtttgaatggaatctgtcaatgtggtactttcaagtgattcaggtgcgccgcctaaatcgggaatgtccttaatatcgaccagtttttcataagcattttccttcttcatcataagaaaaatgccaaagctgcttattgccataaattttcctccttacgtcttgtatacaatcttgctcttgctaaccacgccatcataacgggcggttaatcttgccacggaatcatccatgtttggaataggactataaaacgtcctaagaaaaccaagccgctgcatctctgtatcagcgacaccaagaatcttttcacattcaacagaagcgccagattccttattgctataaacgttgatttctatcatgatgcttgcgtgattctctgttaatgaggaatcaagcgtttttttatacgtcacattgtttttttgttccatcgtcatcaaaggaaacaaaacttctccttttggataaggacgcgaagtatttaaatcctcgatggacgatttcatggaacgtgtaaccgccgtataaatttcattaaaaacagaaatcatgattgaaacaccgcttttgctattttttctgccctgtcaagcagttccattgatgtgttatacataaacgggcgggatggcatacctttcgtccatcgaaacctgttggcttcttcgtcatagtacacccatccaaattctccgtgctggtttacgtcgtattgccacggaactaacggatgcggattgtttttccctacaacacccgtaccaaactctacaaaaccagcataagggcaatccgtgaagatgattccgcttttcccgtccgtataaattagtccgtcgaggcttttgtatagctcccctgaatctactgcgccaagtgaaataatttcattccttgctatctctacaccttctgcaatcaaacgggaaacaacaagttctatcttcttccccacttcttgcttatatagctgtagttcttttctcgccgctgcaatggaaccgacgcttaatccaaaccgtattgttttcatcgtgttcttttttccttctttatagcaacggaaatactgttcaaagacctggctatgcacttcacgctataatcagctggctttgttatatcggtattgtcaacccatagcctgctcgtttcagttatcggacaagtggatttggataaaacaattactttgtcgtaatcggttatgtttccaaactccttattagccgcttctccttgcgcctcagaaatattcccacgctgcttaacgggcgtagaatataaaatttctgattcccctgtttcaaagccatcttcatccaatatcggctgtttcataataggagaagacacataaaaacttcttttgttcttatctagcgttctcatgaaatcacttctactttaggggttatttcagcaagtagagacggggatattcctgcgctttcatatgaccttgcaatggtgttttctgcgtgggaagtctggccttccgctcccattttgctatacagctctatggctattcgcacctgtaaatcgttatatcggggctccaaacaagtttccacaccggattctgtttttacagtcggaaagttaccacacgggtaacggtaggtcaaaattatgttttttgcactttccaacaagtcaagcaaaacattgtcttctacttcttccccgttaagcctgatacgcaaacgctcaagagagttcatgggcttactctccttttttgccgcccggtttttcgttcttaggcggttcgggttccttctgaggctctttgttgggttccttgttttcggggatttccgtgtacggcgggtagtatttgccttcgtgtttaaccatatatggatatttcatattagaccaccttcataacatagcattcatccatccgttcaaacgacggaaggacaatttcggatacaatcgtcgatacgttcacagggtgcggttgcgtgatggttgttaccgctgtccccgtgtttacaatttcaaccgctgcatttgatttccccattaaatcggcctcttccggcgtagtgccaaaccaagtactgcccagcgcaccgtccggtataagcgtaacaagattgtcggggtagaactggtgagtagttccgtcattgtctttgaatttcttgttgtaatcaacaatagaaatattcaacagttgtgaaataatgtttttcacaacaatatctgtcatatacaccgtagcccctgtgttctgtgcaagaaccgccgaacgtaccgctttgctttttgtcagaagtgttagggttgctgtactcataagcgcgatgctcggacgtgtgccggattttgtatatacagcttcaatcgctttctttaaatccgcaatcgggtcagacgtgtccgcattgctccatttatcggaatcggaaacgattttcatgaagttgttattttcaaacgaaccgtcagggtcgtaattatacgagtaaaccatatcgttcgcagaaatagaaatggaaggcttcccgttttcaggagaaagcagctgcataatcattcgttcgggaatgacatctgcgccatcgataagatttttagcgtcgtcaaaaatcttatcaagtgtggctttcaggtatatatcgtccttgtcctgcgccctcaaaatctcctgcctgtctttttccgtaacaataaagctttcacggaaaaacggcatttctgtctcgattttctgcgcgccaattctgttccttggctttgcctttgcgtcaaaattagaaggcatcagtgaaattggaagtcctctgctgcctttaatccaagacaggtcaagaccggccttctttttagccgggaataaagccgcacccaagtacgggattgcgttacttgcaacttcgttataataagctgcaattgcgcgcgctgtaaaaagctttgttaaatccataaactatcctcctatataaatttaatcattggcatagaggcaattgtggcatcatcataggttacaccactgtgttcctgtgcctttttcttgtcgatacacccgtgaatgataaccgtcccgttgggattatccgccgtaacatcgtgcatcagtacaccaaaagcagtaccggttgtaatcgggtttccagattcatcaataggcgtacccgcttttacaaccgctgttccatccgcgattgttacagcctttgcaacgccgaaataatggtcatttgcaagaattattaaggtatttccgaatggtgttgctgcgtatttcatgatttccctcccatataatgtttcatagattccccggctgcttcggcggttttagctcgttccgcgccaagctgctttgctagagcctcgccctctgtatcgtcgccgtcttcaccgtcttttccgccgcctggccgcggtgtttgttttagcagttccgccttaatctctttttccgtcttctccttctgagcggtcagaatagcaataaaggcttctgcgcttgcagtgctttttttgccgtcttcggaaacgatagaatcaataagcttgctgtaatcttcttctgcgattcccgctttcaggaattgtcgttccacgtcaagacggtttttctggatttgaaagcttttttctgcgtctttggccctctgtaaagccgcctgaacatcgtcgtctgagttgcctgataaaagagcagttaattgctcttctgtcgcatcaggaaaaatttttaaaacttcgtcttttgtcaaattacattcctcctagataaaataaaacgccatacctttactgtaggtacggcgttcaagacgctctgttttttggttttcgcttaacttcttcggcctttccttctccgttaaaccgtatgacagcggcacagcgtggacacgataactcggaaacacctgaaatttttcctaaaagcttgttgcaaaatttacatctggcttcattcaatgtctgattcagtttcttcgcctcctgtcttgacctcttgttgtttcatataatccatactgctgctgtaagctaatccagggtcgctaaacataccacaatgcgtaaaagcaagctcaggatgaatcttgttactaccaagcatggttgtgagcacttgtgctttttcctgtatgttttcgtagtttctgcgcgtgaatctaatgtcaatgttttgaatttcaagattcataccctgtacaatttcgcagatataaagggtaagcgttaaaaagcttttttccggttttttaaacatcacttcactgtctttagcccttgattccgctgcactccatccatcccttaactgtaccgctgctcctgtatcggacgtactgcttccaccgtttctgtttggcattccacagatagttaaaaccgcttggtacaggtcatccactaacgtttgcgtttgtgtttggttcagttctccattggcgtaaaacacctttgccggaagtcccggtgttccttttacagatatggcgagttcctttttcagctcttttagcttctcagaactaatttcgcagttttcaaataccaaaattgcctgtataaactgttctattccgtcaacgcgattggattctacgttatccagcgcgtccaaaagcgataatactgtttcaaaggcacccagcctcgcgttgttcgctggatattcaaacactggaatacagtttaaaggatttggctcttttttagtgattttcctcgcttgtatctcatagtaaaaagacgatgtataaaccatataaattatttttctgtcttttttcccaatcatgacagacattaacggtttatgccctaacccgctttgataaacgataaaattaaagcgcgggtctaatgtaaaaatgtccacaggggaaaaatcgacttctttcttcggaagaaccattctgtatgcggttccacaaatatgcccccattcaaccagctctttgtctttggtcgccttgtcttcgtggagcatgatttcgtttaattggttcaaatcatctgcggctttatcatttccacgccggacatattgaataggttccccgattagatagccggttttaaatgaaacaatctcgttcgccctgttttcgctgatacagtttttaatttctgaccgcacttctttgacgcgattacgaataggagttttccctttgtaataatcccaaaggtactgaatttcatcggcgtttatattatggattggtaacgccttatagagtacagaaacaatattatctgtggtaattttttcttcacgcgaatagatgatacgccttccgtatgtttgcctgctttctataaccatcaccacctaatttttagctgctttcattatacaccatcaaaaagccaataagttggttatgatacgcaatatatttagaaaggacgcttaaatacctgaacgctgtttcctgacatggattgaacatactcagcgaacatagccataccatccggcacatcatcatttttgttccggcctgttacggtataggtacataaaaagttcatcatacgtccgtaatccgagtttctttggtattttgactcgtctttaaacaagcaatgctccttaacccaagctgaatttacaatgatttttgtttccttgttttcagtcgtatactttgtggtaacatgcgttaccccacctcttgctttgatttcattttgaattttttcagcaatacgtccaccggcagcattgctctcaaattgtgattgctttactttgtgtttcagaaggatttcaacaaggcggttatctacaacatctggtagcccattatcacatacgcaatcttctatgtaacaatctgaaccatacaaatacccaacgggcaaaaacgcataatctttccccttgtcttttgtatcacagattgataaaattgcgtctggcgcacgcgaaggaagttcaaaataccttttcagttctgattctgaatacaatagcccttctcgttctatcggctgattcatgaacaaggagcggaaactaacatcgtccatattttccttcatgtcgatgaaatactttgtatcaaaccctactccatattggtagttgaaattgctctctccacactcgttgagcgcaggcaatacaataaatttacagcgtgggtcatttccatacttttgctctagtcgtcctatagggtcatgtacactccaccgggtagcgatatgtatttcttttgccccaagcttttttctggtttttaaatcgcttgtgtacttttcccaaagcttatcaagcctttctttcgacaacgcttcttcaataccggaaactaggtcgtctgcataaagtatcttttcgcttctggttgcacctgttagcgttgcatcaatcgccctgcatgttaaagagctgaatcgatgtttcttgtttatatccagcgtttcttctttcgcgtttgtcgctgctaatttgcagctaggaaaaacatcgttccacaggtattctgggtcggttataatttgtttgacaccttcatagaacgagtttgtcaatttgtcactatgcgcggatgcaaggttggggcaatcggggaaccttcccataacccatgataaaaagaagataccgagcgttgattttccggtcccaggcggcattgaaattgttagtaggtctaattcatcatctatcaacgcttgcattgcctgaacagtagtgtacagaacattacgacgcggtaaataaaaacgtttttccggttccctgtcccactctacataaatcaggaaatcatcaaacaaataaggagctgcaaataaataagtaagcttttgcaaatcgtacatttgcgctttaaagcttaaatctttgctttccttcattgcggatttcactttttttcttaactctctatttagttccgaggcctttgtaatatcagtttcacctataatgcgtatacaatcaaatgcatcctgatacaaagtggcgttgccgctgtctttttttatggctcgatatattttttcaatggttttcagcataaaaaagagcgccctccatatagaaggcgctcaacggcactcgtgtttaatcttaaattcctttcattatatctgtcaaagaaaagaaattatcataatgcttctgtaattcatcctcatcatctttttttattgacaaggtggtggtaacaccgagtggaaattgtctatacatatctgaattatcttttatgtacataatacccaatgttccttgtggaaaataaataattacatgctcaatatccggcggtaaagcgtcacttccatctccataatttccgatagagattgccagcatataacaagtaaataaaaaatcttcaaggtcatcttttttaatatcatcaatatttaccgaaattacctgtcttttctcttctgtttttccaatagtaacgtcagcgtcagatttaacataatctttcatctcattcttaatatattccttccaagtagaaaatgcaagttttggttttgtctctggctcagtagccgacgcttctgagctagattctgaaaatgattgttgcgaacttttaatttcgtcaggagacgaacatcccgcaaggaaacacaaaagtaagataccaataattattcttttcatttttaaaccacctaattttataagtttaatacttactcaatattttaagacaatttatcgcttttgtaaatggttatgttgatgacaacctgtaccattgtgtcctgcttattccaagttcttttgcagcgcgtgtgatagataactctcctttatcgcacttttccttgtattctcggaaattttgaacttccttcttaggtcgtccttctttgaacccttctctttgccgtgcaatttgcttgccctcttgtgtgcgttccacaatcatatctctttcaaactccgcgaaggagaacataatattaatcataaatttgccgagaggcgtattatcggcaatccccatattgagaatattaaccgtaacacctctctcgacgagttcctgaaccagttttgccccatcggaagtagtacgcgcaaaacggtcgagcttacagacgataagtgtgtccccagctttaagcttatttatcaactcagtaaatttagggcgtttagtctttgtgcctgtatagcactcttctattatttcttctgctccagctgcaatgagattttctctttgtgcttcaagactgtttccaaaaatctgttttctggaagaaacgcgcccgtatccgtatttcatttttgttcttcctccgttgtaataagaaattgaccgtccggccttctgccgggctttttcttttgtacaacaatttcatatcccaaaatatctaacatttttgttaaaattgaaagccttatatcttttctactaataagttccgctatacccgactgccctttaaatcctaaaagttttgctaattgaatttgtcttattccgctttctgcaattatttctttaaccattccattccatttcattattgcaacctccttttttgtaatttaataatatcacttacatatgattatgtcaagctcttttttattttttcggaattcggaggactaatttaatactatttaaatgtgaaatatcccccaccgtaccgcataaacagcggtattgtaacaaaacttttaagatttgttacaatagataaaatgcaaatttttatcacgtatttatgatttttgtattgacaaaatcatgccggcgtgataatatttaattgtaaacaaaaagccgcacacagcggcacaatttgaaaggagataaacataatgtcaaacatcaaattaaacggcatcaaagaggcggtaaaagagtataacgactggacgcacggctatgcggagatatggctagaccgtgagacaggcgaggtacacacgtcggtgcttgtgggttacaactcctatatcatccgcgaggcagacgatgcatgcaccatcatgtgtaagtgccgtatatgggacactcagaaaaccacagtggcagaggtggagacaaaatgcaacgccgtattcgcggcgttgcacgaggaaaagagggagtaaagatggcatactttgtatcagttaccagctttgacgacttaaaaaagcaataccgcgcactcgctctaaagcatcatcctgacaccggcgggagcactgaggcaatgcaggagattaataacgagtatgatattttgtttaccgtttggaaaatacgcgacaatgtgcagaccgcggaaacggctacaacatcccgctctgagttttacacccaaaacggctggaaaggtactcgccacgactggaaccgcagcttaaaagatattgctcagattgtgcgagcatatgtaaaacaaaaataccccaattataaatttagcgtcagaacctcttatgcctctatgtgtcaggagctgcacgtacaattaaaagagtccccggtaaacatttataaaaagttcgaagaacttaccgacgatgacaaaaacacattgcgccggcgaatgatgcacaaccatttatttaagttaaactgttggagcggcccggaattaaaggcggaatttgaacgaatatggaaagaaaacggcaactattatcggtgcttaaatgatgtaacccaggcggttattgatgacgttgacaaatttgtaaaatcttataattacgaagattgcgacggtcaaatcgattattgcaatgtagatttttattattttggatgtgtgcaagataacggccagtctattaaaattgtccccaaaaccgccagagtcacgcataaagcttataatcccgccgctaaaaaaagaaaggagcaaaaattatgacaaaaaaagaattatcgacctacgccggaacaagattttataatctgtcacagagacctggagctgtgcgcggaactatttactgcctaacagtgtacgaggtaacggcgaacggaacgtgcagatattgttttgaggcaatgtcttgtgtcgcaaacaagtttcaatttgccgagatggaaaaacaaacaaacggaatctatcattccggcaggccgtcggcatccacattaacagctgatttttttaaaaaagccgcccgctaatcaccacaaaaagcagacggcgcgcccacagaataacccatcaaaattattcggggcaatctcattgtagcaggttgccccgcaaaaagaaagaggtaaaactataatgagtaaaaccgcacttaaaaactgcatcaaactatcgtctaaagttacagtttacgtgccggcaacaaacaacgtcaacgagccaatcgacaatgccaaatatgtcgacgaggcagcggccctattgtcacagtgctttggcggcgctacatctacacccgccctaggttactggttgtcgccctctaaaggattaaccaaagaggcaacaacgattgtatttgcttacgcgcgcgaagaggatttaacagagcatatagatgatgttgtcacatactgcgacggacttaaacaacgactttcgcaagattccgtcgccgtgtaggtcaacggcaatatgtattttgtgtaaggaggcgatgcaccgagtgcatatactttttattctgcttgctccgattggcatactgttagctgcaagcaaacactacaaataaaaaagaaaaggccttcctgttttgggaggtcttttcttttgctcaaaatcgctctgtaaggctctgtttggttgataagacaaaccctaccgttgtctctattcgcgcgcttacaaactaaataaggataaaatagacagggtaccgcggcgttgtgtaaccctgcctatgttttattccatttcttccggtaagcttttatacctttgttccatagtttcggcatctggcacttcgcccaatggattatttggtgttacaataatatcttgctggtccctcaatccatcgtagtttttttgccaaaaaattaaagtaaccggatttatcttcccgtggctgcctaaaagctcgcgataagctgctaaagcacccttcgcctttttgatgaagtctatagtcgccgggggtaaaaccttactatatccgagtatagcattacttacatcttgcttggttagtcctaagactgtatacaacccaatgttacccggtcttaaacctttatctatacaatctcggaaatagttgtctattgcttcctctacttcttgaggattctttaaattgacttttggactgttaaagacattttgagcacatcggcaaaataatgcgttttcttcatctgatataggttttaatccattctctcctattacgggactattacgatttatagcctttttcttagctacttgaatagcggcgtcgttgtttgattctgcttcaatagtcgtaggcttcttaggtctacctctcttatccatttttacttttcctttctttatagtcgtcagtaaggccaagcagccagtctgaggaaatattaaggactttacatagtcgtacaagattaggaacgttcggcgtgaatgtaccgtctatgtaattgtttattgctgctggccttacttttaattttcttgcgagttcagcgttcgatagctctttctctttgatgactttttctaagcgctcgccaaatccgtagatgcacatatgctatcctccatcccaataactattctaacggtcactacttttgattgttatataaatgtctttttgacagtataatcgtgcgttttctcccatttgtctaaccgtttctgatttttctttcttacccttgcttttttagcaaaacgagcaaggttccaacaacgcgcataacacggacaattcattgcttttatacttgctgcaatgtcatacagtgatgctttaataaatagatgtgtggtatcgcccgatttgtggaattctattagttgtttcgggatagatatttcgtattgttcaaaagtgttcatatacacagcctcctattccttcgggaaagattcccggtcgagtttcttttccttacgtgctgcgtaccgccatacggcaagcaatacgaacaccgacagaaccgttaatgcgccgattccggcgagtatgtagatgatgatgttcatttcggttcctccttctgtgcttcaatcgctttcatgcattgttcgcatttttgtttttctcccggcaaccatacgtcaaacaatgtgcatttcggtttttttcgttctatcggggcctttcttccgtgggttcggtcacgtagaacgtgatatttacaaacttcatttccaaagaaatctccggcatagagacacttgttctctaagtttttatcgtaggggacttcgtgttgtactgtaatgttcattgtgagttctcctcttctaccaacgcgcgaagcaataacaggtaattgatactgtcagtaattttttcgtcccatagctcaagcggatagttaaaatgttcgtagccatccgttccgatgcacatgtcgtatacgctaacggtatgctttgccatcatccccattaatgcggcaaccggcgtagttcgttcaagcgacgccgctaccttaaaattatgcagtcggtctttggtcgcgtattccttagcctttttacaaaggactattttgcagtgttctaactgcgcactaattatctcgttaaatttctcactgttcatcgcggttcctccttgtcttttttgaaatgcgaaagcgattctttccacttttcgcattttgtttttggcgtatctcattgagccaatcttcaaaagctttcaaacagttgtagattccatattctttgcgcaagcaaatatctattgtgggacatctatcacagttgcgtcctattaatcggtacaacatttccgccgtttcttctagtcttttgctttttatttgctcgtagttagtcattaaaatacaattcctattatcgcgtataatagcattgcagcgatgataactaaaacaacctgcgccaaaaacacgacatttttggaaacaatcaaacgcaaatctttttttacaatcttggctgctctttctgttaattcattccattgcgtgaatgtatcagcatcagggtaatcctcttccagttgtgtcagtttgtcatctgtttcttttactttattcatgttatcatccagccttttaagctgttttttaatccatagatttccgaacaaagcgatttggacgattataaataaagaggcgaatgctatgatttgataaaataaattcacggcctatcttccacctccactttcttaaagtcatatgcccatacccacggattagcgtcccaaccgtataaagggaggtcggattttttgactgtgctgtcccataatatcgagaatgcttctattgcgattttgggcattccctgccaatagttttctccctttttagatttgtaggtttcagcccacgtatcaatatcaacacaatacttataaagctttccgtctttggtatagccttgtatgccctccgaaatcgcttgtccctgcgtaatatcctgcaaccgctctgctcgtactcctgtcacttgtaaaaacgttcgcgcggcggctttcggcatgtggatggagggacgccatttaggtgattctctgtattcatcccagcccggatgttgtacaagaaaacgattgtacggggttgggttctctccgtccgccctgtaatagaagcattctgtgttctcgattacacactcacagtcatccagcttactgtacctgacccatgtttctcgcacatagagataatcacctactttgtacttaggtttgcacgggacaaattgcctgatttgctgtgttattgttccgttcgcattttttactggctctacatatggtgaagcttcgcaaagtacgccgttgtacatttcaaacacgctatcgcagtaccgcggtttaatgacccgacgtgtctgcgttttcctgccatccatgatagcccgcgtcatttcggtgttaaataatatcggctttgctatggcgagtatttcagctcttgtcattgctctcactccttatttccgcaacaattattgtattgctgtttctggattcacatatctttttgacctttcgcgcccgtatcagggcctttcccttgctcttgtacagttttgcgtcggaaaggttaggaacgctaataccgttcaagattatctggattgggtgaagaaacaaagcctttagattaaatcgagcataaaatcgagcgcctccaaagggcaatatgaattttattacataggctttattcatgttcttcccgcaacctccgccattttaaacacctcaatttcagaaccgtcttcatcaaccacaatatcacctttcccaagcgctccaaacaacccaaaagaagcccagtcgcaaccgtcttctggatgctcattctttttaattttaattccgcttactccttttccgttcaacctgccaatgcatcgtgaatagccatcattcggttttcccccggcgtctttgatttcttgtaatgttgttaccctgccgcaggccgggcaaacaaaagcccattttttcgcatcttctccaaaacgtttctttagctcttcaagccattctgcttttgtgtacctcataagttttattccccttccgtaagcatgggtaacataggcggcatgtcgcccgtaagatatgcctgtttaatctgcggtagcataaaatcacttaccgttccaccgtccggcaaaacaatgtttgccataaattcgtcctcaaacaccgaaattccgcattctacagcctcaagcttagcctgtatgacaagtttcaacgcacgccaacgctggcggcacgcttgttcccacgcctcgtattggctgttttccgttctgtcccttccggttggagtaaaacggaattcttcttttttcgggagcggaaggaagaatttcacctgacggtcaaacatggtaaaacaaatcatcgccttacccgatgctgttgcgtaggcaaaattatctgcgccgtacttaatcagtattttttcaatttccaggcgggaaagttcgcttgaaacgtttgtgttctttgcgtattgtgacatgtttatccctcctgttccttcagcgcggcctcggcttcttcgcgggagtggaaaacggttttgccgaagtcacaaaaatcatatgattctttataaccggaaaagccttctgataaatacacgcaacgtaattctccttctatttccgcttcccgtaccttcatttcttctatgcttccagtgcaaatgttatatacagtgtctcccgccatacacggcagttccacgagccgcccttcctcctgcgcttttgcaagcttatatgtttcttccggcgttaagcccgtttcttcgtactcttccagccaagcaagggcgttgtatatcgtgtcgttaatgcagcccatagccctgtcgccatgcactgttaaacatccgtctttgtctctgcctgttattctatccataagctttca

SEQ ID NO: 546 - DNA, 9782 bp, Scatavimonas FBI02887
  source 1..9782: mol_type = genomic DNA
tgggcaaaaacgctgttgcgctgctgatattcctgtattttgtctttatcgttggaatgagcggtgggcttgacgcttggttgattggcgacccgcaagctgtacccattatactgcttggcacagggatatggctcatgagcttggcagtcgtaatgataatcaaaggcttgtgggcaggaaaggagggaagacagtgagattacagatttattaccttgatatgggagcttatcgcaaagcttacataggcgatttttccgatgaacagcttgccgaattattaaccgtatcttgctttgtcgctgtaaagttaacggaaaatgacccatatggtaagacgctaccggacacgatgaaagaatttgattttcggcgcgcggaagatggcacagccataatagaaaaagccgcccacagtgctgacacaccgtgaacggcagaagaaataaacctatttacagtatagcaaacctttacggtttgtcaaggaggaaaacacaatgcaagtaggggattttgtaaaaggattaccaaataatggttacagtgtaaccgatgaagatatgacaaaaggtgttgtcactaaggttgttgaagataccatcaaagtcaaaattattaatcacaaaaggggttgtaagggtatatttgatgtttgcgcagacaaattcgagattatcggccacgtcaaaaaattcaacagaagcgaagtgtttgagcttattaatcgtggctgtataaaagcaatattggattacgacctcaggtacgcagacctcaggtacgcaaacctcaagggcgcagacctcaggggcgcagacctcaatggcgcaaacctcaagggcgcagacctcaatggcgcaaacctcaggggcgcagacctcaatggcgcaaacctcaagggcgcagacctcaggtacgcaaacctcaagggcgcagacctcaggggcgcagacctcaggtacgcagacctcaggggcgcaaatattgatttttcgtgttatccattatggtgtggcagccttgggcttaaagcggataaacgtcttgcctgtcagcttgcgtatcacttgtgttccatgcagtgtgacgacacagaatttgttaaaatgcgcaattctgttctaagctttgcaaatcagtttcatagagccgatgaatgcggtgtcttggaacctatcgaggaggaggttgcataatgaaccgaaagacagaacagttaaacgtatgcaaagcaatgctaaatagttcgcagagcgttgcatattgcgaattatcggacgacataattgccgtaacagcagacggctttagttgctacgtgctttcaaaaaaggaacttatttttgatttaacaaaactaaaaacagccgacttttcatcgtattttgagagaaacgagaagcaggaacacctgacctataccggcatagcaatggaatgtggttttaagcgcgacatgcttgttaagctgaaagggaaaagctttgtgacctatgcgcgaaagtctcttttcgacaagttcaaagggtataacctgtattctgaatcgccacgtgacgcaattatcgccatagacgatttagggcggaaggtaggatttttcctgcctgttgacaatcctcaggacgaggaaggtgaatcttaaatgtacggcttagaaacagcacaacgtcagtacgacgcgcaataccctgataatgagttgccggaagttttaacttgctcggtctgcggctttgaagaacagcgcaagaacacatacacagtagacggaaaaatcatgtgtgaagggtgctttgacgatttttgcgctgaaatgtacgacgagcacggaacagatttttttgaggaacacaaagaagaatatgcgtggttgtggttcaatcagttggattcttccaaacagcgtgaaattgtacgtgaagcttttgagtcgtacattaataagatttcttcatggcttgaaaagtcttgtctggacgaaaatattaaattcttttgcacaagtcacggtgattggaaagattacattaagcgcgttgaaggcgttgaagaaaacaaggagtgattttaatggcagtagtacagccttatgaaatgaatttcagcgataaaaagttcagcatgattatcagcggttcaccgggtatcgggaaaaccacgctcgcactttccgcgcctaaccctgtgttgattgactttgacaagggtatcagccgcgttaacgcgcagcaccgcaagacaacaattgtaagcgatacatacgaggaaattttaaaagaccttaataccccggaagttgcggcagcggaaacaatcatcatcgatacaggcggcagcctaatatcctatctgcaagattgggctatgcgttcaaatccccgcgttaacaaacaaaataacggcgcaatttccctgaaagggtatggagctgttgcaacggagtttaaccattttacagaccgcctaaaagtcgcaatgaacaaaaacgtaatatacatttttcatacggtcgaagaaaaagaccgtgacacagttaagcagcggcttttatgcgagggtaaggcgcgtaatacggtttggcaaccctgcgacctcggctgtttcatgcaaatggtaggagaggaacgtgtcttgggctttacgccgaccgaagaatactttgcaaaaggttgctacgggataagcggaacacgcaagataccaaaactcagtgcaaacacaccaaatgactttttaacaaggctttttgaagaagcgcggcagaacattgccgatgaaagtaaagtctttgaaaaggacaaagagcagtacgacacggcaatgaaggaagtgtctttgataatcgaaacaatcaaagatgctgatacagccaaccgcgcaacagaagctatgaaagatataaaacacgtccttacgagcaacagggagtcaagagctttattcagggcgaaaatcgctgaacttggccttgtttacaataaggaggcgggaacgtatgagctacctgataacgcagagcctgttgaatagttggctctacctctacaaaaccgacgaggaagataaggcgaaacggagtttttcaaatgctttaaaccgtgtttctttacctacaacaaaagcaatgcaaaacgggattgactttgaaaacgccgtatattcgtactgctatgataagtcagtaaaccttccagcgtgttgggaaaaaggtgtaaagggtgtaagccgatatattcaaggaggcgtgtttcagctttcagcaagtacaaaacgccatattgccggattggatttcgttctttacggtcgccttgacgcgttgaaaatgggaacaatttatgacgtgaaattcagcgaatgctataaatgcgggaaatacatagacagcccgcaacatcccatgtactttgctatttgccccgaagtaagccgctttgtttacgtcatatcagatggggaagaggtttggacggaagcatacacacgtcaggaaacacctgatataaacgttacaatcgagcaatttgtagactacctgaaatcggataaattgcttgatacatactgcaagaaatgggaatcgaaatatgggtaacgtagttgtcaaaggattcgtacacggatacgacggtcaaaaccttacaatcgtagctccatttaatcaagactggctacttatgaagcgtcgcgtcaatgagtgcgaaatcaggctcaatgacggcaggacaatatcggcagaccaacggaagaaaatatacgcaaccatgcgggatatatccgaatacaccggacatacgcccgaccagataaaagccctaatgaaatatgactttatcgcaagaacaggttgcgattatttttcgctttcaaatgtcgatatgacgacagcaaatgagttcctaaatttcctgattgaattttgccttgagaatgatattccaacgctggacagtttgcttgaacgttcgcctgatacggcacggtatatctacgcttgcattgcaaataaaaagtgctgtataactcaaaaaaaatgccagatacaccacgtagacgctgtagggcaagggagaaaccgcaaggacatcatacacaagggtatgcacgtacttccgctgttctggaagctgcacaaggaagcgcacgatataggtaaacaaagcttttgcgaaaaataccatgttttcggaataaagcttgacgattatttatgtgagatatggaaggtgagaagcaaatgaacaaagttatcttaatgggacggctcaccgctgaccctgaattaaaaaccacaccatccggtgtatcggttgcgagcttcagtatcgcggtagaccgcagatacgcgaagcagggcgaggaacgacaaacagattttatcaatatcgtatgctggcggcagaaagcagaattcgtttgcaagtattttgtaaagggccagctcattgcgcttgaaggttctatccagacacgccagtatcaggacaaaaacggtaacaaacgcacggcttttgaagtggttgccgacaacgtgtattttacaggcgataaacggggcgcaggggcgcaaacggttgataagcctaatgataccgccttgccgccaacgcaaggctatcctgtaaattcaggctttgaggatatatcatgcgatgatgatttacctttttaaaggagtgattacggatggatattaaagattttattccgcgcggaaaagaaaacgcaatttcaaggagaatgctaagaaccattacaggttgttccgacagggaaatcagaaagatgatacgagaggcccgtttaaaccatgaaggcagctttattttatcatcctctgaagtatcagggtattggctatccgataatcttaccgaggttagggcatttttgcttgaaacccataatcgggcagaaaacacaaatacagttgtacgggtgtataagcaggagcttacaaacagagaagcagccgccgagcggcgaaaaaagcatcctgcctaccacgttaaagaatggagagctaaagggcggtactcttaaatgaattacattacacaaatcaatggattttacatatggctcgaaacgaatgaattgtccgcgtctgctataaatttgtggcacgcacttatgcatatcgcaaacaaaacagggtggcaagataatttcactgtagccatgtcagtcctagagattaagactggattgcagaaacaagctattcagcgtgcaagagttcaactgagagataaaggccggatttcgtttaaaagccgcagcggaaatcaatccgcagtatatcagcttattcctattcctgagcgtgaggatgattttcatccacaaagtgatacgcaatctgatacacaacatgatactcaaagtaatccgcaaagtgatacgcagtccgatacacaaagtgtccctattaataaacaaaacaagaataaacaaaacaaaacgaaacaaaacatgctctctctgccaaagactgcatctgacgttatcaaactatttaatgcaatttgtgttgaccttccttcagcgagcgagctgaccaatgtacgcaaaaagaatatttttatagtccacgaacttttgaatggagactttgtaagcttttttgagcgtgtgcaagcatcagactttttgacaggaagaagtgggaagaaggaaatcccttgtacatttgattgggttataaaccgggataatgccgtgaaaatactcgaagggaattacgacaacggaagcaatgacggtacaagggagcacgaaacaaacccgtttatgaaatacgctttggaggatgacgatggataaaaaagaagcggcgaagctgttggcaattatcaaatgcgcttatccgtcacaatacaaaaacatgcaggacagcgatgcaaaaatcactatttcattatggcaatcgcattttgctaacattcccgctgaactggtttaccaggcagtgaacaggcatattgcaaaaagctcatatgctccagctatcagcgagataaacgacgagctgcacataattcacttaaatgcgcttgaaacaataacagggatgtttacagacgctacggcaggtgaaatagaacgggcagagcgcattgataggctactgagtggatatgagcaaaatcaaaggagattgccggaatgaacaagtataggaacaaaaaggtcattgtagacgggatttcttttgatagcaaaaaggaagcagcacggtataaggaactgagaatgcttgaacgtgcaggaatcattttgaatttacagttacaagtaccttttgagctaatcccaaaacaagacggagaacgtgcttgtacctacaaagccgattttgtatacgagcagaacggaaaaaaggttgtagaggatacaaagggcatgaaaaccgatgtttacaaaatcaagcgaaagctgatgttataccgctatggaatcaaaatcaacgaaacataatacatacggctaccgatacaacgtcaacgagcctgagataagcgacctgtacgagcggttcaaggcttggaaaaaaattccgagaaatgaaccgatttcagatgagcagcggcacgagttcgagagatgggtcgatgtttatatgagaaagaaggcaagacaatgaccgaagaagataaaaagctgtatagcgacgtaaagcgtgctatggggatggtaaagagcatcggaatccctacggtttacgacgatttgtacgattttaagaaataccttgaaggaaagcgcggaaagaaacctgatatggtgggcgcttggacagcggcgacagtcgttgcttattgcaaagatgaagacacgccggaagtatttgtaaaagagacgctggaattatgtctttatcgcaatgcaacgcccgaagaaatttctgcgtctgagtacgctgagttttaggctgagttttaggaggaaaaacgatgtgtgaaacatgcatacacgcgattaagatggcgttaaacagtaggttttcttgtaattgtccccgctctgaattttttaggggagatgtcagcgcagaaaactactgtgaacagtacgctgaaaacgcaaataaacaatgcgctatggataacggcagacagtgccgtggactggtagaaaagcactgtaaagagtgtaaattttataagacaaaggcgcagcttgacaaggaacgtgcagccactaaatcacggcttcgcgcgttgccagaagaacagcaagtttacattaaagaagaatacaaaatcagattttaaaggagatattataatgcctgaaattatccctttgaacccggagctcattcaccgggcaaattataacagctttggcggaaatcgtggagaccatagtaacgcctcatatctcgcctacggtcaagagatacttgattttccaatagcagacagccgaaaagaaaagctactgaaggagttacataaacggtattccgttattctcaactacgaagcacaacacgttagtgttatggttgcgggaccggcgcgttacaatgctaaaaagttagaccacggcgatgacgttttacgttcctccgctgaattttgcgattggtttgacggcatacgaaagcaggtaaagagtttcactcagccagacgacaaactcaagcagactctcgaaatgattgagttttgtgacagccgcggggagtatgaccccgccggggaactggtgaagctcgcctttatcgacaacgccaagttcattgagctttttgaggccatgcttccgaaataccgctggcggaagaacagcaacatctacaaactgtacctccgctcgaaggccggagaagtgaaggaaattaagaaagaggtcgtttacgaggacgacaacctcaccgcatacaaggagggggaccgctactacatcaaatttgttttgcgctgcaagcggcagctccacgtcgccctcaaatcgcgcggttggtggtggaacagctacgaggcggcttgcaaaattgttgaatgtcccaatcaaagaatgtcattttggttggtttgacaaggacgctttatgcaaggcaaaacaaattatgagtaataaagagtggcataaagaaaaagggagaagccatgaaacgaaaatctattccgacaaaggtgcgtaaacgagtttatgagaaatacggtggtcagtgtgcttactgcggagaaccgatagagtacaaagaaatgcaggttgaccacatggaaccgcttgcaaagggcggggcggacagcgaagaaaactatatgccagcctgccgaacttggaatcactataaaagcacactgacggttgagcaattccgcgaacaaatagggcttttaacaaaaaggcttgcggagagagtttatatatacaaactggcacagcgccataggcgcataacggaaaacgagaacccggtaatattctattttgagaaggaggaatcacggtgagcattgaaatctacaacgaaaaactctatacagctcgcaaagaacatcgttgccatatctgcgggataacgattaatctaaacgaacagtattacagggaatctggaaaatacgaaggggatttctttgaccgctgcacatgcatctgctgctatgaagtaagagagcaattcatcatcgatgtaaatgaaactgaatattccgagtgggaaattttagacgaagcaaccaacacattttgcgaagaccattatgaaacaaacccctgcgcttgctgcaactataagaatcctttgcgttgtaacagggtaagggaatattacgaaaaccaacataaaaaacgctgtaagcaagcacagaaaccggaggaataaatcatggtacacgaacttaaaaccgaaccggagcattacgctgcacaaaaggctatgataaaaccttttgaggtgcgaaaaaatgaccgggattttcaagtgggcgacattttggcgctgaatgaatgggaaaacggcaaatataccggaaacgctcttctgcgagaaatcacatacatactggatgacactcaatattgcaaagaaggttttgccgttttaggggttattccatttccgcgcggactaatgcacatagacgcgcccaaagaattaacgagaaagaaaacggaggaagccacatgaatgacaccgtatcaaatttatacgctcgaaagcgtgcaatacaaaaccaaaaactccaacttaaaaaggagttgcgcgaaaaaatagaaaagctcgacaaatcattggaagacatcgaaaaggcgctcaaagtcataaacgatacggtaaaaaatgtcctttgcccggcgtgcggaggaaccgggacaacgcgatatgctgacgcagccggagctatggacgacaaaccttgcgcagattgcaacggaacggggataaaaatgacaaaggaggaattaacatgaacagactgacaacagaaggaatggactttgaagaaatgttttgcgaagaatgtacattttacggagagccaaacggctgtaatttgccggggtataagtcgacttgtaaaccgtttgctttttttgtggatgcagcagaaaagctaaaaaaatacgaggacaccggcctcacgccggaagaaataacggcattggcaagccatgcacaaaaataccaaacaaaagacggcgttgaagtagaatgcgataactgcggcacaatgataccgctgatggagccaaaaccgggattagtgttcatccggcagttttgcccattctgcggagaattattgaaa

SEQ ID NO: 547 - DNA, 1741 bp, Scatavimonas FBI02887
  source 1..1741: mol_type = genomic DNA
tcctcgtataataagatttgcagacagttttaagtgtgtctgcttaattcacttcaggtatcagcaggcttagagatacccgtgatacaatagctgtaggacagcagggtcaagctctcattctcctagttgagccggaaggctgcttcattgaaagtccgttcccctgatccggaagttagctgcaaactcattggctgtttgccggaggcaaggccgccctttcaacagtgagggatatcgcattggccgtctccggaatgattctgatacgcgaggttgcggatgctccggttatcatgggtatctcaaagcctgctggcctgaaatctccacgcggggaggtgaaacatatgaactcactttacgttggcattgacgtgagcagcaaaaacaacgtggcctacctgatgaagccagacggcggcaagcacagcagcttttccgtgcagaacaatctcggcggtgctaaactgttgtcagagagaatcgtgtcggcgctcggttccatgcagctcagcgatgtggtgattggcttagaggctacctccatctacggggacagtcttgtttacgcgctccgagaggacggcggactcgtcaggttccagcgaaagatccatgtcctcaatccaaagcaggtgcgtaagttcaaggagtcctatccagacctgccaaagaacgactgggtggacgccttcgtaatcgccgaccatctccgtttcggcagaattgccaaagaggtctacatggacgattaccgctacaaagccctgcaaaccctcaccagagccagatttgacgtcattcaaaacctgacccgcgagaagcagaggtttgctaactacctgtttctcaagtgctccggcatggcgcaggacaaggacattcaaaacaccagcgccactacgattgcgctcatggaacggtttgaaactgtggatgacttggcgaacgccgaccatgagaaattgattgcctttgttgccgagactggccgtggtagatttgcagacccagcggccaccgcaaaagcagtacaagctgcggccagaggctcttaccgtctgcctaagactgtgaacgatactgtaaaccaagccatgtccgtttccattgcctctatgcgggcattgaaagagcaggtcaaggtcttagaaaaggctattgaacagcaatttgagatcattccaaacactctgacttctgtaccgggtatcggcaaggtctactccgccggtatcatcgctgagatcggcgatatccaccgctttgattctcaggcttccgttgccaagtttgccggccttgtctggacgcagcaccagtccggcgactttgaggcggagcactcccggatgattaaatccggaaaccgctatcttcgctactacctgctggaagccgccaattccgtgagaagatgcgactccgagttccggcgctactacgaccttaagtttaaagaggtcaacaaataccagcacaaacgtgcactcgctttaactgccagaaaactggtccggttggtctttcgactgctgaaggacaaccgcctgtatattccgccggagggctaaacgatcagcttgccgctctgacgaaacggccctgtttcaaaaatactcaggcacagggcttgggggtgtgttgcctttttcgcgttatctgtgcctttttccaacgctttttctgcttttttctttaaccaccctcttgacttaataccattggactttca

SEQ ID NO: 548 - DNA, 275 bp, Scatavimonas FBI02887
  source 1..275: mol_type = genomic DNA
caggttactacaacgcggtcactaaattatattaattatatcatatgcatataataaagtcaaaacttaaaattccttgcagtggctttccgttgtgtggatacgagcactttcgtgttgcatttcatgttgcatagtgctattttttatcaaaattcaatgcaattttcaaaagtattttccatttaataaaaatgaaaaacggctttgcaatggggaaaactcaaaaaaaggcttgaataagggattagttaaaaatagcattacagaggttc

SEQ ID NO: 549 - DNA, 207 bp, Scatavimonas FBI02887
  source 1..207: mol_type = genomic DNA
agagccaaaatgagcaaggatgagcacatcggttgacaaaaacatcggaaatctgtaaaacaggcgcacaattaattgtaacctaaataaagcaatcccccggtagtcgttgccccaaaaaacggggatttacaaggccgggggattttttatgtcaaaaacaaaaaagcccccgtaaagcggaagcttttttgggttgtagaccca
